(19) United States
(12) Patent Application Publication
(10) Pub. No.: US 2023/0250408 A1
(43) Pub. Date: Aug. 10, 2023

(54) NOVEL HYALURONIDASE VARIANTS WITH IMPROVED STABILITY AND PHARMACEUTICAL COMPOSITION COMPRISING THE SAME

(71) Applicant: ALTEOGEN INC., Daejeon (KR)

(72) Inventors: Soon Jae PARK, Daejeon (KR); Hye-Shin CHUNG, Daejeon (KR); Seung Joo LEE, Daejeon (KR); Kyuwan KIM, Daejeon (KR); Hyung-Nam SONG, Daejeon (KR)

(21) Appl. No.: 17/608,729

(22) PCT Filed: Jan. 25, 2021
(86) PCT No.: PCT/KR2021/000943

§ 371 Date: Nov. 3, 2021

(30) Foreign Application Priority Data
Jan. 23, 2020 (KR) 10-2020-0009046

(51) Int. Cl. C12N 9/26; A61K 45/06; C12N 15/63

(52) U.S. Cl. CPC C12N 9/2474; A61K 45/06; C12N 15/63; C12N 2320/30

(57) ABSTRACT

Disclosed are novel PH20 variants or fragments thereof with improved thermal stability and enzymatic activity of human hyaluronidase, which is an enzyme that hydrolyzes hyaluronic acid, and more particularly novel PH20 variants or fragments thereof including one or more amino acid residue substitutions in the variant having the amino acid sequence of SEQ ID NO: 3, wherein one or more amino acid residues at the N-terminus and/or the C-terminus are optionally further deleted.

### BACKGROUND OF THE INVENTION

### Field of the Invention

[0001] The present invention relates to novel human PH20 variants or fragments thereof having increased enzymatic activity and thermal stability compared to human hyaluronidase, which is an enzyme that hydrolyzes hyaluronic acid, and more particularly to PH20 variants or fragments thereof, which include one or more amino acid residue substitutions, deletions and/or insertions in hyaluronidase variants having the amino acid sequence of SEQ ID NO: 3, and optionally in which one or more amino acid residues are deleted from the N-terminus and/or C-terminus, a method for producing the same, and a pharmaceutical composition containing the same.

### DESCRIPTION OF THE RELATED ART

[0002] The human skin is composed of the epidermis, the dermis, and a subcutaneous fat layer, and there are six types of glycosaminoglycans in the skin. These glycosaminoglycans include hyaluronic acid, chondroitin sulfate, dermatan sulfate, heparan sulfate, heparin, and keratin sulfate.

[0003] These glycosaminoglycans are composed of repeating disaccharide sugar units. The number of repeating disaccharide sugar units is different among glycosaminoglycans, but ranges from several hundreds to several thousands. Among the glycosaminoglycans, hyaluronic acid is present in the skin more than half of the amount in the body. Hyaluronic acid is synthesized by hyaluronan synthase present in the cell membrane, is present alone without binding to proteoglycans, and is the only glycosaminoglycan having no sulfate group. Other glycosaminoglycans bind to proteoglycans and have a sulfate group. Hyaluronic acid consists of glucuronic acid and N-acetylglucosamine, alternately linked via β-1,4 and β-1,3 bonds, and is composed of about 5,000 repeating units of these disaccharides. It is known that about one-third (5 g) of hyaluronic acid in the human body is degraded every day.

[0004] Hyaluronidases are enzymes that degrade hyaluronic acid present in the extracellular matrix. Six hyaluronidase genes are known in humans: Hyal1, Hyal2, Hyal3, Hyal4, HyalPS1, and PH20/SPAM1. Human Hyal1 and Hyal2 are expressed in most tissues. PH20/SPAM1 (hereinafter referred to as PH20) is expressed in the sperm plasma membrane and the acrosomal membrane. However, HyalPS1 is not expressed, because it is a pseudogene. Hyaluronidases are divided, depending on the method by which hyaluronic acid is cleaved, into three types: enzymes (EC 3.2.1.35) that cleave β-1,4 bonds between N-acetylglucosamine and glucuronic acid by the use of H₂O; enzymes (EC 3.2.1.36) that cleave β-1,3 bonds between N-acetylglucosamine and glucuronic acid by the use of H₂O; and bacterial hyaluronidases (EC 4.2.99.1) that cleave β-1,4 bonds without using H₂O.

[0005] The catalytic amino acids of Hyal1 are D129 and E131, which hydrolyze hyaluronic acid by substrate-assisted catalysis. Hyal1 exhibits optimum activity at an acidic pH of 3 to 4, and has no enzymatic activity at a pH of 4.5 or higher. In contrast to Hyal1, PH20 exhibits activity throughout a wide pH range of 3 to 8.

[0006] Arming et al. identified that the catalytic amino acids of PH20 are D111 and E113 (Arming et al., 1997). Arming et al. designated Leu as the first amino acid of the PH20, from which a signal peptide or the like is removed, and thus the catalytic amino acids of the PH20 containing the signal peptide correspond to D146 and E148, respectively.

[0007] Hyaluronidase hydrolyzes hyaluronic acid, thereby reducing the viscosity of hyaluronic acid in the extracellular matrix and increasing the permeability thereof into tissue (skin). The subcutaneous area of the skin has a neutral pH of about 7.0 to 7.5. Thus, among various types of hyaluronidases, PH20 is widely used in clinical practice (Bookbinder et al., 2006). In examples in which PH20 is used in clinical practice, PH20 is used as an eye relaxant and an anesthetic additive in ophthalmic surgery, and is also co-administered with an antibody therapeutic agent which is injected subcutaneously (Bookbinder et al., 2006). In addition, based on the property of hyaluronic acid, which is overexpressed in tumor cells, PH20 is used to hydrolyze hyaluronic acid in the extracellular matrix of tumor cells, thereby increasing the access of an anticancer therapeutic agent to the tumor cells. In addition, it is also used to promote resorption of body fluids and blood, which are excessively present in tissue.

[0008] PH20 was first identified in guinea pig sperm by Lathrop et al., and is also known to be expressed in sperm of different species. Human PH20 gene was cloned by Lin et al. and Gmachl et al. Human PH20 has the amino acid sequence of SEQ ID NO: 1, which consists of 509 amino acid residues, and exhibits 60% amino acid identity with guinea pig PH20 gene. Human PH20 enzyme is encoded from the SPAM1 (sperm adhesion molecule-1) gene, and Ser490 of PH20 is present in the form of being bound to glycosylphosphatidylinositol (GPI) on the surface of the sperm plasma membrane and in the acrosomal membrane. Sperm hydrolyzes hyaluronic acid using PH20 when it penetrates oocytes through the hyaluronan-rich cumulus layer of the oocytes. PH20 is present in an amount corresponding to 1% or less of the amount of proteins in sperm, and has six N-glycosylation sites (N82, N166, N235, N254, N368, and N393).

[0009] Currently commercially available PH20 is obtained by extraction from the testes of cattle or sheep. Examples thereof include Amphadase® (bovine hyaluronidase) and Vitrase® (sheep hyaluronidase).

[0010] Bovine testicular hyaluronidase (BTH) is obtained by removing a signal peptide and 56 amino acids on the C-terminal from bovine wild-type PH20 during post-translational modification. BTH is also a glycoprotein, and has a mannose content of 5% and a glucosamine content of 2.2% based on the total components including amino acids. When animal-derived hyaluronidase is repeatedly administered to the human body at a high dose, a neutralizing antibody can be produced. Since animal-derived hyaluronidase contains other biomaterials in addition to PH20, it may cause an allergic reaction when administered to the human body (Bookbinder et al., 2006). In particular, the production and the use of PH20 extracted from cattle can be limited due to concerns of mad cow disease. In order to overcome this problem, studies on the recombinant protein of human PH20 have been conducted.

[0011] Recombinant protein of human PH20 has been reported to be expressed in yeast (P. pastoris), DS-2 insect cells, and animal cells. The recombinant PH20 proteins produced in insect cells and yeast differ from human PH20 in terms of the pattern of N-glycosylation during post-translational modification.

[0012] Hyaluronidases, protein structures of which have been identified are Hyal1 (PDB ID: 2PE4) (Chao et al., 2007) and bee venom hyaluronidase (PDB ID: 1FCQ, 1FCU, 1FCV). Hyal1 is composed of two domains, a catalytic domain and an EGF-like domain. The catalytic domain is in the form of (β/α)₈ in which an alpha-helix and a beta-strand, which characterize the secondary structure of the protein, are each repeated eight times (Chao et al., 2007). The EGF-like domain is completely conserved in variants in which the C-terminus of Hyal1 is spliced differently. The amino acid sequences of Hyal1 and PH20 are 35.1% identical, and the protein structure of PH20 has not yet been found.

[0013] A recombinant protein of human PH20 was developed by Halozyme Therapeutic, Inc. and has been sold under the trade name Hylenex® (Bookbinder et al., 2006; Frost, 2007).

[0014] When D146 and E148, which are the catalytic amino acids of PH20, were mutated to asparagine (D146N) and glutamine (E148Q), respectively, there was no enzymatic activity (Arming et al., 1997). In addition, when R246 of PH20 was substituted with glycine, the enzymatic activity was reduced by 90%, and when E319 was substituted with glutamine and R322 was substituted with threonine, the enzymatic activity disappeared. A variant in which 36 amino acids at the C-terminus of PH20 were removed (truncation of amino acids 474-509) exhibited a 75% reduction in enzymatic activity compared to wild-type PH20. This mutant was not secreted extracellularly, but remained in HeLa cells. A mutant in which C-terminal 134 amino acids were removed from PH20 had no enzymatic activity and was not secreted extracellularly. According to Frost et al., the C-terminal 477-483 region of PH20 is essential for soluble expression (Frost, 2007). The activity of full-length PH20 (1-509) or a PH20 variant having a C-terminus truncated at position 467 was merely 10% of a PH20 variant having a C-terminus truncated at one of positions 477 to 483 (Frost, 2007).

[0015] Recombinant PH20 is medically used as a carrier to promote subcutaneous delivery of pharmaceuticals, to reduce intraocular pressure in patients with ophthalmic diseases, to delay stenosis after surgery, as a dispersant to improve the activity of chemotherapeutic agents in diseases such as cancer, as an auxiliary therapeutic agent for surgery, and the like.

[0016] In particular, in the case of protein drugs, recently, high-dose products with high concentrations ranging from tens of mg to hundreds of mg per 1 mL have been developed, and thus the application of recombinant PH20 as a carrier to promote subcutaneous delivery of such protein drugs is increasing. Such protein drugs may have problems of low physical stability resulting from an increase in viscosity and aggregation of proteins due to the high concentration thereof. In addition, the aggregation of proteins is irreversible, and small amounts of proteins start to aggregate and aggregate form larger clumps (Schon et al., 2015). That is, recombinant PH20 administered in combination undergoes aggregation, thus reducing the stability of protein drugs.

[0017] Meanwhile, conventional recombinant PH20 is still insufficient from the aspects of thermal stability and expression level. Therefore, there is great demand in industry for a recombinant hyaluronidase having further improved biological and physico-chemical properties.

### REFERENCE

[0018] Arming, S., Strobl, B., Wechselberger, C., and Kreil, G. (1997). In-vitro mutagenesis of PH-20 hyaluronidase from human sperm. Eur. J. Biochem. 247, 810-814.
[0019] Bookbinder, L. H., Hofer, A., Haller, M. F., Zepeda, M. L., Keller, G. A., Lim, J. E., Edgington, T. S., Shepard, H. M., Patton, J. S., and Frost, G. I. (2006). A recombinant human enzyme for enhanced interstitial transport of therapeutics. J. Control. Release 114, 230-241.
[0020] Chao, K. L., Muthukumar, L., and Herzberg, O. (2007). Structure of human hyaluronidase-1, a hyaluronan hydrolyzing enzyme involved in tumor growth and angiogenesis. Biochemistry 46, 6911-6920.
[0021] Frost, G. I. (2007). Recombinant human hyaluronidase (rHuPH20): an enabling platform for subcutaneous drug and fluid administration. Expert Opin. Drug Deliv. 4, 427-440. Schon, A., Clarkson, B. R., Siles, R., Ross, P., Brown, R. K., Freire, E. (2015) Denatured state aggregation parameters derived from concentration dependence of protein stability. Anal. Chem. 488, 45-50
[0022] WO 2020/022791A (2020 Jan. 30.)

### SUMMARY OF THE INVENTION

[0023] Therefore, the present invention has been made in view of the above problems, and it is one object of the present invention to provide a PH20 variant or fragment thereof which is improved in thermal stability, enzyme activity and expression level, compared to wild-type PH20, preferably mature wild-type PH20.

[0024] It is another object of the present invention to provide a composition for treating cancer containing the PH20 variant or fragment thereof and a method of treating cancer using the same.

[0025] In accordance with one aspect of the present invention, the above and other objects can be accomplished by the provision of a PH20 variant or fragment thereof comprising one or more amino acid residue substitutions, deletions and/or insertions in a hyaluronidase variant having the amino acid sequence of SEQ ID NO: 3, and in which one or more amino acid residues at the N-terminus or C-terminus are selectively deleted.

[0026] In accordance with another aspect of the present invention, there are provided a composition for treating cancer containing the PH20 variant or fragment thereof and a method of treating cancer using the same.

### Effects of the Invention

[0027] The PH20 variants or fragments thereof according to the present invention have increased protein expression levels and show an increase in protein aggregation temperature of 4-11.5° C. or so when expressed in CHO (ExpiCHO) cells so that they are efficiently produced and are imparted with higher thermal stability compared to the mature wild-type PH20.

[0028] Further, as the result of a substrate-gel assay, one of tests to measure the activity of hyaluronidase, the PH20 variants or fragments thereof according to the present invention have improved protein refolding so that they are re-natured faster than the mature wild-type PH20, and the original enzymatic activity is maintained regardless of the C-terminal cleavage position.

[0029] Furthermore, the PH20 variants or fragments thereof according to the present invention have low immunogenicity, so that they can be repeatedly administered to the human body.

### BRIEF DESCRIPTION OF THE DRAWINGS

[0030] The above and other objects, features and other advantages of the present invention will be more clearly understood from the following detailed description taken in conjunction with the accompanying drawings, in which:

[0031] FIG. 1 shows the results of SDS-PAGE analysis of various variants based on a PH20 variant having the amino acid sequence of SEQ ID NO: 3. The result of the following SDS-PAGE analysis regarding each variant is obtained by purifying an animal cell culture solution expressing each variant through column chromatography and performing 10% SDS-PAGE analysis on the final purified variant;

[0032] More specifically, FIG. 1A shows the results of SDS-PAGE regarding variants HM98, HM99, HM130, HM143, HM71, HM100, HM131, HM72, HM101, and HM114;

[0033] FIG. 1B shows the results of SDS-PAGE regarding variants HM63, HM102, HM115, HM64, HM103, HM116, HM125, HM132, HM65, HM133, HM144, HM104 and HM117;

[0034] FIG. 1C shows the results of SDS-PAGE gel regarding variants HM66, HM105, HM134, HM76, HM106, HM135, HM136 and HM67;

[0035] FIG. 1D shows the results of SDS-PAGE regarding variants HM82, HM83, HM84, HM85, HM86, HM88, HM89, HM107, HM118, HM90, HM91, HM92, HM93, HM94 and HM95;

[0036] FIG. 1E shows the results of SDS-PAGE regarding variants HM73, HM111, HM121, HM139, HM74, HM112 and HM140;

[0037] FIG. 1F shows the results of SDS-PAGE regarding variants HM75, HM141, HM145, HM70, HM77, HM142, HM78, HM79, HM96, HM146, HM147, HM149 and HM150;

[0038] FIG. 2 shows the expressions levels of a mature wild-type PH20 and a Hyal2-variant, a Hyal3-variant and a Hyal4-variant in which the region M345 to I361 of the mature wild-type PH20 was substituted with corresponding sequences of Hyal2, Hyal3 and Hyal4, respectively, wherein Lane CS of SDS-PAGE is a culture medium sample, Lane FT is an unbound impurity in a HisTag column, and Lane E is a HisTag column eluate;

[0039] FIG. 3 shows the results of SDS-PAGE analysis of various variants based on a PH20 variant having the amino acid sequence of SEQ ID NO: 3. The result of the following SDS-PAGE analysis regarding each variant is obtained by purifying an animal cell culture solution expressing each variant through column chromatography and performing 10% SDS-PAGE analysis on the final purified variant;

[0040] FIG. 3A shows the results of SDS-PAGE regarding variants HM152, HM153, HM154, HM155, HM156, HM157, HM158, HM159, HM160, HM161, HM162, HM163, HM164, HM165, HM166, HM167, HM168 and HM169;

[0041] FIG. 3B shows the results of SDS-PAGE regarding variants HM170, HM171, HM172, HM173, HM174, HM175, HM176, HM177, HM178, HM179, HM180, HM181, HM182, HM183, HM184, HM185 and HM186;

[0042] FIG. 3C shows the results of SDS-PAGE regarding variants HM190, HM191, HM192, HM193, HM194, HM195, HM196, HM197, HM198, HM199, HM203, HM204 and HM205;

[0043] FIG. 3D shows the results of SDS-PAGE regarding variants HM208, HM210, HM211, HM212, HM213, HM214, HM216, HM217, HM218, HM219 and HM220;

[0044] FIG. 3E shows the results of SDS-PAGE regarding variants HM231, HM232, HM233, HM234, HM235, HM243, HM245 and HM246;

[0045] FIG. 3F shows the results of SDS-PAGE regarding variants HM254, HM261, HM262, HM263, HM266, HM268, HM271, HM275, HM276, HM279, HM280, HM287 and HM288; and

[0046] FIG. 4 shows the results of SDS-PAGE confirming the thermostability of wild-type PH20 (L36-Y482) and variant PH20 (F38-F468) having the amino acid sequence of SEQ ID NO: 3, wherein Lanes A, B, C and D show the results of SDS-PAGE analysis regarding initial wild-type PH20 (Lanes A and C) and the PH20 variant of SEQ ID NO: 3 (Lanes B and D) in a reduced form (Lanes A and B) and a non-reduced form (Lanes C and D), and Lanes E, F, G and H show the results of SDS-PAGE analysis regarding initial wild-type PH20 (Lanes E and G) and variant PH20 of SEQ ID NO: 3 (Lanes F and H) in a reduced form (Lanes E and F) and a non-reduced form (Lanes G and H) after being stored for 7 days at 42° C.

### DETAILED DESCRIPTION OF THE INVENTION

[0047] Unless defined otherwise, all technical and scientific terms used herein have the same meanings as appreciated by those skilled in the field to which the present invention pertains. In general, the nomenclature used herein is well-known in the art and is ordinarily used.

[0048] In the present invention, the position of the amino acid residue of each variant is referred from the amino acid sequence according to SEQ ID NO: 1, when described based on wild-type PH20, and the position of the amino acid residue of each variant is referred from the amino acid sequence according to SEQ ID NO: 3, when described based on the PH20 variant having SEQ ID NO: 3.

[0049] The present inventors found through previous research that a hyaluronidase PH20 variant, which includes one or more amino acid residue substitutions in the region corresponding to an alpha-helix region and/or a linker region thereof, preferably an alpha-helix 8 region (S347 to C381) and/or a linker region (A333 to R346) between alpha-helix 7 and alpha-helix 8, in wild-type PH20 having an amino acid sequence of SEQ ID NO: 1, preferably mature wild-type PH20, and optionally in which one or more of the N-terminal and/or C-terminal amino acid residues are selectively cleaved and deleted, exhibits superior efficacy compared to conventional wild-type PH20 or fragments thereof, and filed a patent application regarding this finding (see WO 2020/022791A).

[0050] As used herein, the term “mature wild-type PH20” means a protein consisting of amino acid residues L36 to Y482 or L36 to S490 of SEQ ID NO: 1, which lack M1 to T35, which form a signal peptide, and N483 to L509 or A491 to L509, which are not related to the substantial enzymatic function of PH20, in the amino acid sequence of SEQ ID NO: 1 of wild-type PH20.

[0051] Specifically, the present inventors found through previous research that, when amino acid sites corresponding to T341 to I361, which is a part of an alpha-helix 8 region (S347 to C381) and/or a linker region (A333 to R346) between alpha-helix 7 and alpha-helix 8, in wild-type PH20 having an amino acid sequence of SEQ ID NO: 1 is substituted with amino acid residues corresponding to wild-type Hyal1 having the sequence of SEQ ID NO: 2, the expression efficiency and enzymatic activity are improved, and fragments in which a part of the amino acid sequence at the N-terminus and C-terminus is deleted also exhibit superior expression efficiency and high enzymatic activity.

TABLE 1
Amino acid sequence of wild-type PH20 and
wild-type Hyal1

Amino acid sequence of wild-type PH20
(SEQ ID NO: 1)
MGVLKFKHIFFRSFVKSSGVSQIVFTFLLIPCCLTLNFRAPPVIPNVPFL
WAWNAPSEFCLGKFDEPLDMSLFSFIGSPRINATGQGVTIFYVDRLGYYP
YIDSITGVTVNGGIPQKISLQDHLDKAKKDITFYMPVDNLGMAVIDWEEW
RPTWARNWKPKDVYKNRSIELVQQQNVQLSLTEATEKAKQEFEKAGKDFL
VETIKLGKLLRPNHLWGYYLFPDCYNHHYKKPGYNGSCENVEIKRNDDLS
WLWNESTALYPSTYLNTQQSPVAATLYVRNRVREAIRVSKIPDAKSPLPV
FAYTRIVFTDQVLKFLSQDELVYTFGETVALGASGIVIWGTLSIMRSMKS
CLLLDNYMETILNPYIINVTLAAKMCSQVLCQEQGVCIRKNWNSSDYLHL
NPDNFAIQLEKGGKFTVRGKPTLEDLEQFSEKFYCSCYSTLSCKEKADVK
DTDAVDVCIADGVCIDAFLKPPMETEEPQIFYNASPSTLSATMFIVSILF
LIISSVASL
Amino acid sequence of wild-type Hyal1
(SEQ ID NO: 2)
MAAHLLPICALFLTLLDMAQGFRGPLLPNRPFTTVWNANTQWCLERHGVD
VDVSVFDVVANPGQTFRGPDMTIFYSSQLGTYPYYTPTGEPVFGGLPQNA
SLIAHLARTFQDILAAIPAPDFSGLAVIDWEAWRPRWAFNWDTKDIYRQR
SRALVQAQHPDWPAPQVEAVAQDQFQGAARAWMAGTLOLGRALRPRGLWG
FYGFPDCYNYDFLSPNYTGQCPSGIRAQNDQLGWLWGQSRALYPSIYMPA
VLEGTGKSQMYVQHRVAEAFRVAVAAGDPNLPVLPYVQIFYDTTNHFLPL
DELEHSLGESAAQGAAGVVLWVSWENTRTKESCQAIKEYMDTTLGPFILN
VTSGALLCSQALCSGHGRCVRRTSHPKALLLLNPASFSIQLTPGGGPLSL
RGALSLEDQAQMAVEFKCRCYPGWQAPWCERKSMW

[0052] As a result of continuous research, the inventors found that a variant having the sequence of SEQ ID NO: 3, constructed by substituting the amino acid region corresponding to T341 to I361 of wild-type PH20 having the amino acid sequence of SEQ ID NO: 1 with the corresponding amino acid sequence of wild-type Hyal1 having the sequence of SEQ ID NO: 2, still exhibits excellent expression efficiency and high enzymatic activity, as well as remarkably improved protein aggregation temperature (T_{agg}) compared to the wild-type PH20, although it includes additional substitutions, deletions and/or insertions of amino acid residues, and further optionally includes deletions of one or more amino acid residues at the N-terminus and/or C-terminus. Based on this finding, the present invention has been completed.

[0053] The variant having the sequence of SEQ ID NO: 3 is constructed by substituting 15 amino acid residues, namely, T341S, L342W, S343E, I344N, M345T, S347T, M348K, K349E, L352Q, L353A, L354I, D355K, N356E, E359D and I361T in wild-type PH20 having the amino acid sequence of SEQ ID NO: 1.

[0054] In this regard, the PH20 variant or fragment thereof according to the present invention includes substitution, deletion and/or insertion of one or more amino acid residues in the PH20 variant having the amino acid sequence of SEQ ID NO: 3, and optionally includes deletion of one or more amino acid residues at the N-terminus and/or C-terminus.

[0055] As described above, the variant having the amino acid sequence of SEQ ID NO: 3 is a variant in which amino acid residues of T341 to I361 of wild-type PH20 are substituted with corresponding amino acid residues of wild-type Hyal1 (see Table 2). The variant having the amino acid sequence of SEQ ID NO: 3 or a fragment thereof including amino acid residue deletion at the N-terminus and C-terminus was identified as a variant having activity and stability superior to those of wild-type PH20 in previous research.

TABLE 2
Amino acid sequence of PH20 variant in which
amino acid residues at positions T341 to I361
of wild-type PH20 are substituted with cor-
responding amino acid residues of Hyla1
(SEQ ID NO: 3)

MGVLKFKHIFFRSFVKSSGVSQIVFTFLLIPCCLTLNFRAPPVI
PNVPFLWAWNAPSEFCLGKFDEPLDMSLFSFIGSPRINATGQGV
TIFYVDRLGYYPYIDSITGVTVNGGIPQKISLQDHLDKAKKDIT
FYMPVDNLGMAVIDWEEWRPTWARNWKPKDVYKNRSIELVQQQN
VQLSLTEATEKAKQEFEKAGKDFLVETIKLGKLLRPNHLWGYYL
FPDCYNHHYKKPGYNGSCFNVEIKRNDDLSWLWNESTALYPSTY
LNTQQSPVAATLYVRNRVREAIRVSKIPDAKSPLPVFAYTRIVF
TDQVLKFLSQDELVYTFGETVALGASGIVIWGSWENTRTKESCQ
AIKEYMDTTLNPYIINVTLAAKMCSQVLCQEQGVCIRKNWNSSD
YLHLNPDNFAIQLEKGGKFTVRGKPTLEDLEQFSEKFYCSCYST
LSCKEKADVKDTDAVDVCIADGVCIDAFLKPPMETEEPQIFYNA
SPSTLSATMFIVSILFLIISSVASL

[0056] Specifically, the PH20 variant or fragment thereof according to the present invention may include one or more mutations, preferably one or more amino acid residue substitutions, deletions and/or insertions in the amino acid sequence of SEQ ID NO: 3, and has a higher protein aggregation temperature (T_{agg}), which is an index indicating protein stability, than the wild-type PH20. In addition, the PH20 variant according to the present invention does not include the wild-type PH20 of SEQ ID NO: 1.

[0057] As used herein, the term “PH20 variant” is intended to include a variant having not only a mutation of one or more amino acid residues, preferably substitution, deletion and/or insertion of one or more amino acid residues in the amino acid sequence of SEQ ID NO: 3, but also deletion of one or more amino acid residues at the N-terminus or C-terminus thereof together with the substitution, deletion and/or insertion of the amino acid residues, and is used with substantially the same meaning as the expression “PH20 variant or fragment thereof”.

[0058] Preferably, the PH20 variant according to the present invention includes amino acid residue substitution, insertion, and/or deletion at one or more positions selected from the group consisting of R39, D65 to L68, N82, T84, I102 to I105, T132 to Y134, N166, L179 to T182, T185 to K187, V241 to K244, N266 to Q269, P271, V272, K290 to P292, Q311 to K314, G340 to N363, L441, S442, D451 to D453, D461, V463 and D461 to V463 in a variant having the amino acid sequence of SEQ ID NO: 3, and has a higher protein aggregation temperature (T_{agg}) than that of wild-type PH20.

[0059] The PH20 variant according to the present invention may include a mutation at 20 or fewer, preferably 17 or fewer, more preferably 15 or fewer amino acid positions in the amino acid sequence of SEQ ID NO: 3, but is not limited thereto.

[0060] More preferably, the PH20 variant or fragment thereof according to the present invention includes at least one amino acid residue substitution selected from the group consisting of R39K, D65A, E66A, P67A, L68A, N82A, T84N, I102A, D103A, S104A, S104N, I105A, I105Q, T132A, T132S, F133A, Y134A, N166A, N166K, L179A, L179S, L179I, L179F, S180T, S180A, L181A, L181M, T182A, T185A, E186A, E186D, K187A, V241A, E242A, I243A, K244A, N266A, T267A, Q268A, Q268D, Q268I, Q268N, Q269A, P271A, V272A, K290A, I291A, I291G, I291L, P292A, P292D, Q311A, V312A, L313A, L313P, L313M, K314A, G340Q, S341H, S341D, S341T, W342I, W342D, W342H, W342L, E343V, E343S, E343Y, E343Q, N344F, N344I, T345E, T345K, T345S, R346M, R346F, R346L, R346T, R346S, R346A, T347Q, T347E, T347V, T347W, T347H, T347S, K348Q, K348F, K348D, K348T, K348E, K348M, E349L, E349W, E349A, S350Q, S350I, S350D, S350T, S350E, S350N, Q352E, Q352G, Q352Y, Q352W, Q352T, A353E, A353Y, A353H, A353K, I354E, I354Q, I354S, I354V, I354A, I354N, I354T, I354R, I354W, I354L, K355Q, K355H, K355D, E356M, E356F, E356I, E356L, E356Q, E356V, E356D, Y357W, Y357F, M358V, M358R, M358Y, M358L, D359K, D359V, D359Y, D359Q, D359T, D359S, D359E, T360Y, T360R, T360L, T360D, T360S, T361M, T361E, T361H, T361L, T361D, T361I, L362A, N363M, N363E, L441A, S442A, D451A, D451S, T452A, T452D, T452H, T452K, T452G, T452P, T452M, T452F, D453A, D461R, D461A, G462A, V463Y and V463A in the variant having the amino acid sequence of SEQ ID NO: 3, but is not limited thereto.

[0061] In the present invention, an expression described by a one-letter amino acid residue code together with numbers, such as “S341”, means the amino acid residue at each position in the amino acid sequence of SEQ ID NO: 1 or SEQ ID NO: 3.

[0062] For example, “S341” means that the amino acid residue at position 341 in the amino acid sequence of SEQ ID NO: 3 is serine and “S341H” means that serine at position 341 of SEQ ID NO: 3 is substituted with histidine.

[0063] The PH20 variant or a fragment thereof according to the present invention is interpreted as including variants or fragments thereof in which an amino acid residue at a specific amino acid residue position is conservatively substituted.

[0064] As used herein, the term “conservative substitution” refers to modifications of a PH20 variant that involve the substitution of one or more amino acids with other amino acids having similar biochemical properties that do not result in loss of the biological or biochemical function of the PH20 variant.

[0065] The term “conservative amino acid substitution” refers to substitution of the amino acid residue with an amino acid residue having a similar side chain. Families of amino acid residues having similar side chains have been defined and are well known in the art to which the present invention pertains. These families include amino acids with basic side chains (e.g., lysine, arginine and histidine), amino acids with acidic side chains (e.g., aspartic acid and glutamic acid), amino acids with uncharged polar side chains (e.g., asparagine, glutamine, serine, threonine, tyrosine, and cysteine), amino acids with nonpolar side chains (e.g., glycine, alanine, valine, leucine, isoleucine, proline, phenylalanine, methionine, and tryptophan), amino acids with beta-branched side chains (e.g., threonine, valine, and isoleucine), and amino acids with aromatic side chains (e.g., tyrosine, phenylalanine, tryptophan, and histidine).

[0066] It is found that the PH20 variant or fragments thereof of the present invention retains the activity thereof despite having conservative amino acid substitutions.

[0067] In addition, the PH20 variant or fragment thereof according to the present invention is interpreted to include PH20 variants or fragments thereof having substantially the same function and/or effect as those/that of the PH20 variant or fragment thereof according to the present invention, and having amino acid sequence homology of at least 80% or 85%, preferably at least 90%, more preferably at least 95%, and most preferably at least 99% to the PH20 variant or fragment thereof according to the present invention.

[0068] The PH20 variants or fragments thereof according to the present invention have increased expression levels and protein refolding rate, and thereby have higher thermal stability than mature wild-type PH20. Furthermore, the enzymatic activity of the PH20 variants was greater than or similar to that of mature wild-type PH20 despite the increase in thermal stability.

[0069] Meanwhile, although the mature wild-type PH20 variant having cleavage at the C-terminal is known to have decreased enzymatic activity, the PH20 variants according to the present invention exhibit similar or increased enzymatic activity and expression efficiency, and high protein aggregation temperatures (T_{agg}) due to the more rapid protein refolding and thermal stability thereof, although one or more amino acid residues at the C-terminus are cleaved and deleted, and/or 1 to 7, preferably, 1 to 5 amino acid residues at the N-terminus are cleaved and deleted.

[0070] Accordingly, the PH20 variant or fragment thereof according to the present invention is characterized in that it includes one or more amino acid mutations, preferably one or more amino acid residue substitutions, deletions and/or insertions in the variant having the amino acid sequence of SEQ ID NO: 3 or the like, and one or more residues of N-terminus and/or C-terminus are additionally deleted, but is not limited thereto.

[0071] In one embodiment, the PH20 variant or fragment thereof according to the present invention may be one in which cleavage occurs before an amino acid residue selected from the group consisting of M1 to P42 from the N-terminus, preferably before an amino acid residue L36, N37, F38, R39, A40, P41, or P42 at the N-terminus, in the amino acid sequence of SEQ ID NO: 3, so that one or more amino acid residues from the N-terminus are deleted, and/or cleavage occurs after an amino acid residue selected from the group consisting of V455 to L509, preferably after an amino acid residue selected from the group consisting of V455 to S490, most preferably after an amino acid residue V455, D456, C458, D461, C464, I465, D466, A467, F468, K470, P471, P472, M473, E474, T475, E476, P478, I480, Y482, A484, P486, T488, or S490 at the C-terminus, so that one or more amino acid residues at the C-terminus are deleted.

[0072] The expression “cleavage occurs before an amino acid residue selected from the group consisting of M1 to P42 at the N-terminus” means that a portion of amino acid residues immediately before the selected amino acid residue from among M1 to P42 at the N-terminus is cleaved and deleted. The expression “cleavage occurs before M1” means that no cleavage occurs at the N-terminus.

[0073] For example, the expression “cleavage occurs before an amino acid residue L36, N37, F38, R39, A40, P41, or P42” means that all amino acid residues from M1 to T35 immediately before L36, all amino acid residues from M1 to L36 immediately before N37, all amino acid residues from M1 to N37 immediately before F38, all amino acid residues from M1 to F38 immediately before R39, all amino acid residues from M1 to R39 immediately before A40, all amino acid residues from M1 to A40 immediately before P41, or all amino acid residues from M1 to P41 immediately before P42 in the amino acid sequence of SEQ ID NO: 3 according to the present invention are cleaved and removed.

[0074] In addition, the expression “cleavage occurs after an amino acid residue selected from the group consisting of V455 to L509 at the C-terminus” means that a portion of amino acid residues immediately before the selected amino acid residue from among M1 to P42 at the N-terminus is cleaved and deleted.

[0075] For example, the expression “cleavage occurs after an amino acid residue V455, D456, C458, D461, C464, I465, D466, A467, F468, K470, P471, P472, M473, E474, T475, E476, P478, I480, Y482, A484, P486, T488 or S490 at the C-terminus” means that an amino acid residue after the amino acid residue V455, D456, C458, D461, C464, I465, D466, A467, F468, K470, P471, P472, M473, E474, T475, E476, P478, I480, Y482, A484, P486, T488 or S490 in the amino acid sequence of SEQ ID NO: 3 according to the present invention is cleaved or all the amino acid residue(s) from the amino acid residue immediately after the selected amino acid residue to L509 is/are deleted.

[0076] Preferably, the novel PH20 variant or fragment thereof according to the present invention is characterized in that it includes an amino acid residue substitution, deletion or insertion at one or more positions in the variant having the amino acid sequence of SEQ ID NO: 3, a truncation before F38 at the N-terminus, and a truncation after F468 at the C-terminus.

[0077] More preferably, the novel PH20 variant or fragment thereof according to the present invention may include an amino acid sequence selected from the group consisting of amino acid sequences of SEQ ID NOS: 163 to 316, but is not limited thereto.

[0078] The sequences of the substituted or cleaved amino acids in the PH20 variant constructed in the specific embodiment according to the present invention are as shown in Table 6.

[0079] In addition, in the present invention, an attempt was made to increase the expression of a recombinant PH20 protein using other signal peptide of proteins highly expressed in animal cells, instead of using the original signal peptide of PH20.

[0080] Therefore, in another embodiment, the novel PH20 variant according to the present invention may be one in which the N-terminus further includes a human growth hormone signal peptide having an amino acid sequence MATGSRTSLLLAFGLLCLPWLQEGSA of SEQ ID NO: 4, a human serum albumin signal peptide having an amino acid sequence MKWVTFISLLFLFSSAYS of SEQ ID NO: 5, or a human Hyal1 signal peptide having an amino acid sequence MAAHLLPICALFLTLLDMAQG of SEQ ID NO: 6 as shown in Table 3 below, instead of the signal peptide of wild-type PH20, which consists of M1 to T35, but is not limited thereto.

[0081] The expression “instead of the signal peptide of wild-type PH20, which consists of M1 to T35” means the case in which the signal peptide in the amino acid sequence of SEQ ID NO: 3 is partially or completely deleted, and thus does not perform the function thereof. In addition, the expression is meant to include the case in which a portion of the N-terminus is further deleted, for example, the case in which cleavage occurs before the N37, F38, R39, A40, P41 or P42 residue occurs so that an additional deletion of the N-terminus together with the deletion of the signal peptide of wild-type PH20 occurs.

TABLE 3
Signal peptide sequence according to
present invention

| | | SEQ |
|---|---|---|
| | | ID |
| | Amino acid sequence | NO. |
| Human Growth | MATGSRTSLLLAFGLLCLPWLQEGSA | 4 |
| hormone | | |
| Human serum | MKWVTFISLLFLFSSAYS | 5 |
| albumin | | |
| Human Hyal1 | MAAHLLPICALFLTLLDMAQG | 6 |

[0082] In another aspect, the present invention is directed to a composition for treating cancer containing the novel PH20 variant or fragment thereof according to the present invention and a method for treating cancer using the same.

[0083] The cancers or carcinomas that can be treated by the novel PH20 variant or fragment thereof according to the present invention are not particularly limited, but include both solid cancers and blood cancers. The cancer may be selected from the group consisting of skin cancer such as melanoma, liver cancer, hepatocellular carcinoma, gastric cancer, breast cancer, lung cancer, ovarian cancer, bronchial cancer, nasopharyngeal cancer, laryngeal cancer, pancreatic cancer, bladder cancer, colorectal cancer, colon cancer, uterine cervical cancer, brain cancer, prostate cancer, bone cancer, thyroid cancer, parathyroid cancer, renal cancer, esophageal cancer, biliary tract cancer, testis cancer, rectal cancer, head and neck cancer, ureteral cancer, osteosarcoma, neurocytoma, fibrosarcoma, rhabdomyosarcoma, astrocytoma, neuroblastoma and neuroglioma, but is not limited thereto. Preferably, cancers that can be treated by the composition according to the present invention may be selected from the group consisting of colorectal cancer, breast cancer, lung cancer and renal cancer, but are not limited thereto.

[0084] The composition of the present invention may be a pharmaceutical composition. The pharmaceutical composition may further include a pharmaceutically acceptable composition. The composition may contain one or more selected from the group consisting of lactose, dextrose, sucrose, sorbitol, mannitol, starch, gum acacia, calcium phosphate, alginate, gelatin, calcium silicate, microcrystalline cellulose, polyvinylpyrrolidone, cellulose, water, syrups, methyl cellulose, methylhydroxybenzoate, propylhydroxybenzoate, talc, magnesium stearate, and mineral oil, which are typically used in the preparation of drugs, but is not limited thereto. In addition, the pharmaceutical composition may further contain one or more selected from the group consisting of diluents, excipients, lubricants, wetting agents, sweeteners, aromatics, emulsifiers, suspensions and preservatives, which are typically used in the preparation of drugs.

[0085] The pharmaceutical composition may be administered orally or parenterally. The parenteral administration is carried out by intravenous injection, subcutaneous injection, intramuscular injection, intraperitoneal injection, endothelial administration, topical administration, intranasal administration, intrapulmonary administration, rectal administration, and the like. For oral administration, the active ingredient in the oral composition needs to be formulated into a coated dosage form or into a dosage form that can protect the active ingredient from disintegrating in the stomach, considering that peptides and proteins are digested in the stomach. Alternatively, the present composition may be administered via any device by which the active ingredient can move to the target cell of interest.

[0086] The pharmaceutical composition may be formulated in the form of solutions, suspensions, syrups or emulsions in oils or aqueous media, or in the form of extracts, grains, powders, granules, tablets or capsules, and may additionally include dispersing or stabilizing agents for the purpose of formulation.

[0087] In particular, the composition for treating cancer according to the present invention may be used in combined therapy with other anticancer drugs.

[0088] An anticancer drug that can be used in combined therapy with the novel PH20 variant or fragment thereof according to the present invention is preferably a chemical anticancer drug, an antibody-based anticancer drug, a biological anticancer drug, an RNAi, or a cell therapeutic agent, but is not limited thereto.

[0089] Preferably, the anticancer drug that can be used in combined therapy with the novel PH20 variant or fragment thereof according to the present invention is preferably an immuno-oncologic agent, and more preferably an immune checkpoint inhibitor, but is not limited thereto.

[0090] In addition, the present invention is directed to a method for treating cancer using the novel PH20 variant or fragment in combination with other anticancer agents, particularly the anticancer agents described above.

[0091] In another aspect, the present invention is directed to a nucleic acid encoding the PH20 variant or fragment thereof.

[0092] The nucleic acids, as used herein, may be present in cells, in the cell lysate, or in the partially purified or substantially pure form. “Isolated” or “to be substantially pure”, when referring to nucleic acids, refer to those that have been purified and thus separated from other cellular components or other contaminants, e.g., other cellular nucleic acids or proteins, by standard techniques, including alkaline/SDS treatment, CsCl banding, column chromatography, agarose gel electrophoresis, and others well known in the art. The nucleic acids of the present invention may be DNA or RNA.

[0093] In still another aspect, the present invention is directed to a recombinant expression vector including the nucleic acid. For expression of the PH20 variant or fragment thereof according to the present invention, a DNA encoding the PH20 variant or fragment thereof can be obtained by standard molecular biology techniques (e.g., PCR amplification or cDNA cloning using a hybridoma that expresses the PH20 variant), and the DNA can be inserted into an expression vector such that it is “operatively linked” to transcriptional and translational control sequences.

[0094] As used herein, the term “operatively linked” is intended to mean that a gene encoding the PH20 variant or fragment thereof is ligated into a vector such that transcriptional and translational control sequences serve intended functions thereof of regulating the transcription and translation of the gene encoding the PH20 variant or fragment thereof. The expression vector and expression control sequences are chosen to be compatible with the expression host cell that is used. The genes encoding the PH20 are inserted into the expression vector by standard methods (e.g., ligation of complementary restriction enzyme sites on a fragment of the gene encoding the PH20 variant or fragment thereof and a vector, or blunt-end ligation if no restriction enzyme sites are present).

[0095] In addition, the recombinant expression vectors carry regulatory sequences that control the expression of a gene encoding the PH20 variant or fragment thereof in the host cell. The term “regulatory sequence” is intended to include promoters, enhancers and other expression control elements (e.g., polyadenylation signals) that control the transcription or translation of the genes encoding the PH20 variant or fragment thereof. It will be appreciated by those skilled in the art that the design of the expression vector, including the selection of regulatory sequences, may depend on such factors as the choice of the host cell to be transformed, the desired level of expression of the protein, etc.

[0096] In yet another aspect, the present invention is directed to a host cell including the nucleic acid or the vector. The host cell according to the present invention is preferably selected from the group consisting of animal cells, plant cells, yeasts, E. coli., and insect cells, but is not limited thereto.

[0097] Specifically, the host cell according to the present invention include prokaryotic cells such as E. coli, Bacillus subtilis, Streptomyces sp., Pseudomonas sp., Proteus mirabilis or Staphylococcus sp., fungi such as Aspergillus sp., yeasts such as Pichia pastoris, Saccharomyces cerevisiae, Schizosaccharomyces sp. and Neurospora crassa, and eukaryotic cells such as lower eukaryotic cells, and higher other eukaryotic cells such as insect cells.

[0098] In addition, the host cells that can be used in the present invention may be derived from plants or mammals. Preferably, examples of the host cells include, but are not limited to, monkey kidney cells (C0S7), NSO cells, SP2/0, Chinese hamster ovary (CHO) cells, W138, baby hamster kidney (BHK) cells, MDCK, myeloma cells, HuT 78 cells and HEK293 cells. More preferably, CHO cells may be used.

[0099] The nucleic acid or the vector is transfected into a host cell. Transfection can be performed using various techniques that are generally used to introduce foreign nucleic acid (DNA or RNA) into prokaryotic or eukaryotic cells, for example, electrophoresis, calcium phosphate precipitation, DEAE-dextran transfection or lipofection. In order to express the PH20 variant or fragment thereof of the present invention, various combinations of recombinant expression vectors and host cells can be employed. The preferred expression vector for eukaryotic cells includes gene expression regulatory sequences derived from, but not limited to, SV40, bovine papillomavirus, adenovirus, adeno-associated virus, cytomegalovirus and retrovirus. Expression vectors that can be used for bacterial hosts include bacterial plasmids such as pET, pRSET, pBluescript, pGEX2T, pUC vectors, col E1, pCR1, pBR322, pMB9 and derivatives thereof, obtained from E. coli; a plasmid having broad host range, such as RP4; phage DNAs exemplified by various phage lambda derivatives, such as, λgt10, λgt11 and NM989; and other DNA phages, such as M13 and filamentous single-stranded DNA phage. An expression vector available for yeast cells may be a 2-μm plasmid and derivatives thereof. Expression vectors for insect cells include pVL941.

[0100] In another aspect, the present invention is directed to a method for producing a PH20 variant or fragment thereof, the method including culturing the host cell and expressing the PH20 variant or fragment thereof according to the present invention.

[0101] When a recombinant expression vector capable of expressing the PH20 variant or fragment thereof is introduced into mammalian host cells, the PH20 variant or fragment thereof can be produced by culturing the host cells for a period of time such that the PH20 variant or fragment thereof is expressed in the host cells, preferably a period of time such that the PH20 variant is secreted into the medium during culture of the host cells.

[0102] In an alternative embodiment, the expressed PH20 variant or fragment thereof can be isolated and purified from the host cells. Isolation or purification of the PH20 variant or fragment thereof can be performed by conventional isolation/purification methods (e.g., chromatography) that are used for proteins. The chromatography may include a combination of one or more selected from affinity chromatography, ion exchange chromatography, and hydrophobic chromatography, but is not limited thereto. In addition to the chromatography, a combination of filtration, ultrafiltration, salting out, dialysis, and the like may be used.

[0103] In order to confirm the industrial applicability of the enzyme, it is necessary to analyze the catalytic reaction rate of the enzyme. Types of enzymatic reactions include an enzyme reaction with an active site with fixed reactivity and an enzyme reaction with several active sites with various reactivity. It is known that the catalytic reaction rate of enzymes having an active site with fixed reactivity, such as hyaluronidase, follows the Michaelis-Menten rate formula.

[0104] The Michaelis-Menten's enzyme kinetic is premised on the assumption of an enzymatic reaction as a two-step reaction system including a reversible reaction step in which Complex [ES] of Enzyme (E)-Substrate (S) is formed and an irreversible reaction step in which the ES complex is dissociated to yield Product (P). In this case, k_{f}, kᵣ and k_{cat} are the rate constants of the reaction in each direction (Alan Fersht (1977) Enzyme structure and mechanism).

$$E + S {⇌}_{{k}_{r}}^{{k}_{f}} ES {⟶}^{{k}_{cat}} E + P$$

[0105] The enzymatic reaction assumes that the process of reacting the enzyme with the substrate to produce the ES complex rapidly reaches equilibrium, or may be considered to be a pseudo-steady state assuming that d[ES]/dt≈0 is satisfied by sufficiently lowering the concentration of the enzyme by performing a reaction that maintains a sufficiently high substrate concentration. Since the rate equations assuming fast equilibrium or pseudo-steady state are derived in the same manner, a pseudo-steady state in which the substrate concentration is initially higher than the enzyme concentration is assumed in most experiments.

[0106] When conditions such as “the amount of enzyme is constant before and after the reaction” and “when a chemical reaction reaches chemical equilibrium, the reaction rate at which the product is obtained is equal to the rate at which the product is decomposed again” are used under such an assumption, the reaction rate of the final product may be expressed by the following Michaelis-Menten rate formula. In this case, K_{M}=(kᵣ+k_{cat})/k_{f}, and Vₘₐₓ=k_{cat} [E]₀.

$$v = \frac{d [ P ]}{dt} = \frac{{V}_{max} [ S ]}{{K}_{M} + [ S ]}$$

[0107] The Lineweaver-Burk equation is used to experimentally analyze the enzyme reaction rate using the Michaelis-Menten rate formula. This equation shows the relationship between the reciprocal 1/V of the experimentally measured reaction rate with the reciprocal 1/[S] of the given substrate concentration in the experiment. Statistical verification that this equation is a linear equation demonstrates that the enzyme reaction is a reaction following Michaelis-Menten's rate formula, and K_{M} and Vₘₐₓ can be calculated using this equation.

[0108] Enzymes that catalyze a chemical reaction have a transition state after binding to a substrate at an active site, and the activation energy for reaching the transition state having high energy is lowered through multiple bonds with the substrate. The equilibrium constant for reaching this transition state is proportional to k_{cat}/K_{M}. Here, 1/K_{M} is an index that combines the degree to which an enzyme-substrate complex is produced by bonding the enzyme to the substrate with the degree to which the enzyme-substrate complex is maintained without being decomposed, and k_{cat} is the equilibrium constant at which a product is obtained from the enzyme-substrate complex. Therefore, k_{cat}/K_{M} can be said to be an indicator of how much product can be obtained from the substrate and the enzyme, that is, the catalytic efficiency of the enzyme.

[0109] The industrial availability of hyaluronidase is proportional to the catalytic efficiency thereof. In particular, when the enzyme is injected subcutaneously along with a polymeric pharmacologically active substance such as a monoclonal antibody, the catalytic efficiency of hyaluronidase plays an important role. In the case where the variant according to the present invention has higher k_{cat}/K_{M} than the wild-type PH20, when the hyaluronidase combined with the polymeric pharmacologically active substance is administered subcutaneously, hyaluronic acid present therein is rapidly decomposed and thus a superior effect of rapidly dispersing the pharmacologically active substance can be obtained. In addition, when the variant according to the present invention has a larger k_{cat} than the wild-type PH20, the maximum reaction rate Vₘₐₓ increases at the same enzyme concentration, thereby providing excellent effects of decomposing a greater amount of hyaluronic acid during the same period of time and dispersing the pharmacologically active substance in a wider region.

[0110] Therefore, in order to confirm the enzymatic properties of the PH20 variant according to the present invention, the enzyme reaction rate of each variant was analyzed, and V. (maximum enzyme reaction rate), K_{M} (substrate concentration under 50% Vₘₐₓ condition), k_{cat} (substrate conversion rate), and k_{cat}/K_{M} (enzyme catalyst efficiency) thereof were compared in Example 4. The results described above demonstrate that the PH20 variant according to the present invention is superior to wild-type PH20.

### EXAMPLE

[0111] Hereinafter, the present invention will be described in more detail with reference to examples. However, it will be obvious to those skilled in the art that these examples are provided only for illustration of the present invention and should not be construed as limiting the scope of the present invention.

### Example 1. Construction of PH20 Variants

[0112] For construction of PH20 variants, cDNA (clone ID: hMU002604) of wild-type PH20 was purchased from the Korean Human Gene Bank. Wild-type PH20 encodes amino acids from L36 to S490. The PH20 gene was amplified by polymerase chain reaction (hereinafter referred to as PCR) and inserted into the XhoI and NotI restriction enzyme sites of a pcDNA3.4-TOPO vector. For expression in ExpiCHO cells, the signal peptide of human growth hormone, human serum hormone or human Hyal1 was used as a signal peptide instead of the original signal peptide of PH20. For protein purification using a HisTrap column, the DNA sequence of a His-tag was located at the 3′-end of the PH20 cDNA. The amino acid substitution of PH20 variants was performed using PCR, and the amino acid substitution was confirmed through DNA sequencing.

[0113] The list of primers used in cloning of the PH20 variants are summarized in Table 4 below, and the specific sequences of the primers are summarized in Table 5 below.

TABLE 4
List of primers used in cloning of PH 20
variants according to present invention

| | Primer | | |
|---|---|---|---|
| Clone | 1 | 2 | 3 |
| cB4205 | ALB-SP-Xho | B4-hy2 | SPAM1-6H-not |
| cB4206 | ALB-SP-Xho | B4-hy3 | SPAM1-6H-not |
| cB4207 | ALB-SP-Xho | B4-hy4 | SPAM1-6H-not |
| cB4213-m63 | opB4-Xho-hSA | op-F468-6H-not | — |
| cB4213-m64 | opB4-Xho-hSA | op-Q347-m64 | op-F468-6H-not |
| cB4213-m65 | op-Xho-hSA-L | op-Q348-m65 | op-F468-R |
| cB4213-m66 | op-Xho-hSA-L | op-Q350-m66 | op-F468-R |
| cB4213-m67 | opB4-Xho-hSA | op-Q355-m67 | op-F468-6H-not |
| cB4213-m69 | op-Xho-hSA-L | op-V358-m69 | op-F468-6H-not |
| cB4213-m70 | op-Xho-hSA-L | op-A362-m70 | op-F468-6H-not |
| cB4213-m71 | opB4-Xho-hSA | op-V343-m71 | op-F468-6H-not |
| cB4213-m72 | opB4-Xho-hSA | op-F344-m72 | op-F468-6H-not |
| cB4213-m73 | op-Xho-hSA-L | op-K359-mega- | op-F468-6H-not |
| | | NL73 | |
| cB4213-m74 | op-Xho-hSA-L | op-Y360-m74 | op-F468-6H-not |
| cB4213-m75 | opB4-Xho-hSA | op-M361-m75 | op-F468-6H-not |
| cB4213-m76 | opB4-Xho-hSA | op-E352-m76 | op-F468-6H-not |
| cB4213-m77 | opB4-Xho-hSA | op-M363-m77 | op-F468-6H-not |
| cB4213-m78 | opB4-Xho-hSA | op-N84-m78 | op-F468-6H-not |
| cB4213-m79 | opB4-Xho-hSA | op-K166-m79 | op-F468-6H-not |
| cB4213-m82 | op-Xho-hSA-L | op-354E-m82 | op-F468-6H-not |
| cB4213-m83 | op-Xho-hSA-L | op-354Q-m83 | op-F468-6H-not |
| cB4213-m84 | op-Xho-hSA-L | op-354S-m84 | op-F468-6H-not |
| cB4213-m85 | op-Xho-hSA-L | op-354V-m85 | op-F468-6H-not |
| cB4213-m86 | op-Xho-hSA-L | op-354A-m86 | op-F468-6H-not |
| cB4213-m88 | op-Xho-hSA-L | op-354N-m88 | op-F468-6H-not |
| cB4213-m89 | op-Xho-hSA-L | op-354T-m89 | op-F468-6H-not |
| cB4213-m90 | op-Xho-hSA-L | op-356M-m90 | op-F468-6H-not |
| cB4213-m91 | op-Xho-hSA-L | op-356F-m91 | op-F468-6H-not |
| cB4213-m92 | op-Xho-hSA-L | op-356I-m92 | op-F468-6H-not |
| cB4213-m93 | op-Xho-hSA-L | op-356L-m93 | op-F468-6H-not |
| cB4213-m94 | op-Xho-hSA-L | op-356Q-m94 | op-F468-6H-not |
| cB4213-m95 | op-Xho-hSA-L | op-356V-m95 | op-F468-6H-not |
| cB4213-m96 | op-Xho-hSA-L | op-343V_364M- | op-F468-6H-not |
| | | m96 | |
| cB4213-m97 | op-Xho-hSA-L | op-340Q-m97 | op-F468-6H-not |
| cB4213-m98 | op-Xho-hSA-L | op-341H-m98 | op-F468-6H-not |
| cB4213-m99 | op-Xho-hSA-L | op-342I-m99 | op-F468-6H-not |
| cB4213-m100 | op-Xho-hSA-L | op-343Y-m100 | op-F468-6H-not |
| cB4213-m101 | op-Xho-hSA-L | op-345E-m101 | op-F468-6H-not |
| cB4213-m102 | op-Xho-hSA-L | op-346F-m102 | op-F468-6H-not |
| cB4213-m103 | op-Xho-hSA-L | op-347E-m103 | op-F468-6H-not |
| cB4213-m104 | op-Xho-hSA-L | op-349L-m104 | op-F468-6H-not |
| cB4213-m105 | op-Xho-hSA-L | op-350I-m105 | op-F468-6H-not |
| cB4213-m106 | op-Xho-hSA-L | op-352G-m106 | op-F468-6H-not |
| cB4213-m107 | op-Xho-hSA-L | op-354R-m107 | op-F468-6H-not |
| cB4213-m110 | op-Xho-hSA-L | op-358R-m110 | op-F468-6H-not |
| cB4213-m111 | op-Xho-hSA-L | op-359V-m111 | op-F468-6H-not |
| cB4213-m112 | op-Xho-hSA-L | op-360R-m112 | op-F468-6H-not |
| cB4213-m114 | op-Xho-hSA-L | op-345K-m114 | op-F468-6H-not |
| cB4213-m115 | op-Xho-hSA-L | op-346L-m115 | op-F468-6H-not |
| cB4213-m116 | op-Xho-hSA-L | op-347V-m116 | op-F468-6H-not |
| cB4213-m117 | op-Xho-hSA-L | op-349W-m117 | op-F468-6H-not |
| cB4213-m118 | op-Xho-hSA-L | op-354W-m118 | op-F468-6H-not |
| cB4213-m121 | op-Xho-hSA-L | op-359Y-m121 | op-F468-6H-not |
| cB4213-m125 | op-Xho-hSA-L | op-347W-m125 | op-F468-6H-not |
| cB4213-m126 | op-Xho-hSA-L | op-357W-m126 | op-F468-6H-not |
| cB4213-m130 | op-Xho-hSA-L | op-342D-m130 | op-F468-6H-not |
| cB4213-m131 | op-Xho-hSA-L | op-343Q-m131 | op-F468-6H-not |
| cB4213-m132 | op-Xho-hSA-L | op-347H-m132 | op-F468-6H-not |
| cB4213-m133 | op-Xho-hSA-L | op-348F-m133 | op-F468-6H-not |
| cB4213-m134 | op-Xho-hSA-L | op-350D-m134 | op-F468-6H-not |
| cB4213-m135 | op-Xho-hSA-L | op-352Y-m135 | op-F468-6H-not |
| cB4213-m136 | op-Xho-hSA-L | op-353E-m136 | op-F468-6H-not |
| cB4213-m138 | op-Xho-hSA-L | op-358Y-m138 | op-F468-6H-not |
| cB4213-m139 | op-Xho-hSA-L | op-359Q-m139 | op-F468-6H-not |
| cB4213-m140 | op-Xho-hSA-L | op-360L-m140 | op-F468-6H-not |
| cB4213-m141 | op-Xho-hSA-L | op-361E-m141 | op-F468-6H-not |
| cB4213-m142 | op-Xho-hSA-L | op-363E-m142 | op-F468-6H-not |
| cB4213-m143 | op-Xho-hSA-L | op-342H-m143 | op-F468-6H-not |
| cB4213-m144 | op-Xho-hSA-L | op-348D-m144 | op-F468-6H-not |
| cB4213-m145 | op-Xho-hSA-L | op-361H-m145 | op-F468-6H-not |
| cB4213-m146 | opB4-Xho-hSA | Op-R39-m146-R | op-F468-6H-not |
| cB4213-m147 | opB4-Xho-hSA | Op-A40-m147-R | op-F468-6H-not |
| cB4213-m149 | opB4-Xho-hSA | op-D456-6H-not | — |
| cB4213-m150 | op-Xho-hSA-L | op-350Q360R-m150 | op-F468-6H-not |
| cB4213-m152 | opB4-Xho-hSA | Op-m152-D65A-R | op-F468-6H-not |
| cB4213-m153 | opB4-Xho-hSA | Op-m153-E66A-R | op-F468-6H-not |
| cB4213-m154 | opB4-Xho-hSA | Op-m154-P67A-R | op-F468-6H-not |
| cB4213-m155 | opB4-Xho-hSA | Op-m155-L68A-R | op-F468-6H-not |
| cB4213-m156 | op-Xho-hSA-L | op-311A-m156 | op-F468-6H-not |
| cB4213-m157 | op-Xho-hSA-L | op-312A-m157 | op-F468-6H-not |
| cB4213-m158 | op-Xho-hSA-L | op-313A-m158 | op-F468-6H-not |
| cB4213-m159 | op-Xho-hSA-L | op-314A-m159 | op-F468-6H-not |
| cB4213-m160 | op-Xho-hSA-L | N266A-m160 | op-F468-6H-not |
| cB4213-m161 | op-Xho-hSA-L | T267A-m161 | op-F468-6H-not |
| cB4213-m162 | op-Xho-hSA-L | Q268A-m162 | op-F468-6H-not |
| cB4213-m163 | op-Xho-hSA-L | Q269A-m163 | op-F468-6H-not |
| cB4213-m164 | op-Xho-hSA-L | P271A-m164 | op-F468-6H-not |
| cB4213-m165 | op-Xho-hSA-L | V272A-m165 | op-F468-6H-not |
| cB4213-m166 | opB4-Xho-hSA | Op-m166-I102A-R | op-F468-6H-not |
| cB4213-m167 | opB4-Xho-hSA | Op-m167-D103A-R | op-F468-6H-not |
| cB4213-m168 | opB4-Xho-hSA | Op-m168-S104A-R | op-F468-6H-not |
| cB4213-m169 | opB4-Xho-hSA | Op-m169-I105A-R | op-F468-6H-not |
| cB4213-m170 | op-Xho-hSA-L | op-m170-T132A-R | op-F468-6H-not |
| cB4213-m171 | op-Xho-hSA-L | op-m171-F133A-R | op-F468-6H-not |
| cB4213-m172 | op-Xho-hSA-L | op-m172-Y134A-R | op-F468-6H-not |
| cB4213-m173 | op-Xho-hSA-L | V241A-m173 | op-F468-6H-not |
| cB4213-m174 | op-Xho-hSA-L | E242A-m174 | op-F468-6H-not |
| cB4213-m175 | op-Xho-hSA-L | I243A-m175 | op-F468-6H-not |
| cB4213-m176 | op-Xho-hSA-L | K244A-m176 | op-F468-6H-not |
| cB4213-m177 | opB4-Xho-hSA | Op-m177-L179A-R | op-F468-6H-not |
| cB4213-m178 | opB4-Xho-hSA | Op-m178-S180A-R | op-F468-6H-not |
| cB4213-m179 | opB4-Xho-hSA | Op-m179-L181A-R | op-F468-6H-not |
| cB4213-m180 | opB4-Xho-hSA | Op-m180-T182A-R | op-F468-6H-not |
| cB4213-m181 | opB4-Xho-hSA | Op-m181-T185A-R | op-F468-6H-not |
| cB4213-m182 | opB4-Xho-hSA | Op-m182-E186A-R | op-F468-6H-not |
| cB4213-m183 | opB4-Xho-hSA | Op-m183-K187A-R | op-F468-6H-not |
| cB4213-m184 | op-Xho-hSA-L | op-K290A-m184 | op-F468-6H-not |
| cB4213-m185 | op-Xho-hSA-L | op-I291A-m185 | op-F468-6H-not |
| cB4213-m186 | op-Xho-hSA-L | op-P292A-m186 | op-F468-6H-not |
| cB4213-m190 | op-Xho-hSA-L | L441A-m190 | op-F468-6H-not |
| cB4213-m191 | op-Xho-hSA-L | S442A-m191 | op-F468-6H-not |
| cB4213-m192 | opB4-Xho-hSA | op-D451A-m192 | op-F468-6H-not |
| cB4213-m193 | opB4-Xho-hSA | op-T452A-m193 | op-F468-6H-not |
| cB4213-m194 | op-Xho-hSA-L | op-D453A-m194 | op-F468-6H-not |
| cB4213-m195 | op-Xho-hSA-L | op-D461A-6H-not | op-F468-6H-not |
| cB4213-m196 | op-Xho-hSA-L | op-G462A-6H-not | op-F468-6H-not |
| cB4213-m197 | op-Xho-hSA-L | op-V463A-6H-not | op-F468-6H-not |
| cB4213-m198 | op-Xho-hSA-L | op-N82A-m198-R | op-F468-6H-not |
| cB4213-m199 | op-Xho-hSA-L | op-N166A-m199-R | op-F468-6H-not |
| cB4213-m203 | op-Xho-hSA-L | Op-S104N-m203-R | op-F468-6H-not |
| cB4213-m204 | op-Xho-hSA-L | Op-I105Q-m204-R | op-F468-6H-not |
| cB4213-m205 | op-Xho-hSA-L | op-Q268D-m205-F | op-F468-6H-not |
| cB4213-m208 | op-Xho-hSA-L | op-Q268I-m208-F | op-F468-6H-not |
| cB4213-m210 | op-Xho-hSA-L | op-291G-m210-F | op-F468-6H-not |
| cB4213-m211 | op-Xho-hSA-L | op-292D-m211-F | op-F468-6H-not |
| cB4213-m212 | op-Xho-hSA-L | op-T452D-m212 | op-F468-6H-not |
| cB4213-m213 | op-Xho-hSA-L | op-T452H-m213 | op-F468-6H-not |
| cB4213-m214 | op-Xho-hSA-L | op-T452K-m214 | op-F468-6H-not |
| cB4213-m216 | op-Xho-hSA-L | Op-T452G-m216 | op-F468-6H-not |
| cB4213-m217 | op-Xho-hSA-L | Op-T452P-m217 | op-F468-6H-not |
| cB4213-m218 | op-Xho-hSA-L | op-T452M-m218 | op-F468-6H-not |
| cB4213-m219 | op-Xho-hSA-L | op-T452F-m219 | op-F468-6H-not |
| cB4213-m220 | op-Xho-hSA-L | op-D461R-6H-not- | op-F468-6H-not |
| | | m220 | |
| cB4213-m231 | op-Xho-hSA-L | op-V463Y-6H-not- | — |
| | | m231 | |
| cB4213-m232 | op-Xho-hSA-L | op-S180T-R-m232 | op-F468-6H-not |
| cB4213-m233 | op-Xho-hSA-L | op-D451S-F-m233 | op-F468-6H-not |
| cB4213-m234 | op-Xho-hSA-L | op-L313P-m234-F | op-F468-6H-not |
| cB4213-m235 | op-Xho-hSA-L | op-L313M-m235-F | op-F468-6H-not |
| cB4213-m243 | op-Xho-hSA-L | op-L179S-m243-R | op-F468-6H-not |
| cB4213-m245 | op-Xho-hSA-L | op-L179I-m245-R | op-F468-6H-not |
| cB4213-m246 | op-Xho-hSA-L | op-L179F-m246-R | op-F468-6H-not |
| cB4213-m254 | op-Xho-hSA-L | FQQ-Mega-m254 | op-F468-6H-not |
| cB4213-m261 | op-Xho-hSA-L | op-Q268N-m259-m | op-F468-6H-not |
| cB4213-m262 | op-Xho-hSA-L | B4-124-R | op-F468-6H-not |
| cB4213-m263 | op-Xho-hSA-L | B4-124-R | op-F468-6H-not |
| cB4213-m266 | op-Xho-hSA-L | op-L181M, E186D- | op-F468-6H-not |
| | | m266 | |
| cB4213-m268 | opB4-Xho-hSA | op-Q268A-m268-m | op-F468-6H-not |
| cB4213-m271 | opB4-Xho-hSA | op-344I, 348M- | op-F468-6H-not |
| | | m271 | |
| cB4213-m275 | op-Xho-hSA-L | op-DLSS-m275 | op-F468-6H-not |
| cB4213-m276 | op-Xho-hSA-L | op-DLS-m276 | op-F468-6H-not |
| cB4213-m279 | opB4-Xho-hSA | Op-K348M-m279 | op-F468-6H-not |
| cB4213-m280 | opB4-Xho-hSA | Op-N344I K348M- | op-F468-6H-not |
| | | m280 | |
| cB4213-m287 | op-Xho-hSA-L | Q268A-m162 | op-F468-6H-not |
| cB4213-m288 | opB4-Xho-hSA | Q268A-m162 | op-F468-6H-not |

TABLE 5
Primer sequences used for cloning of PH20
variants

| | SEQ | |
|---|---|---|
| | ID | |
| Primer | NO | Nucleotide sequence (5′->3′) |
| B4-hy2 | 7 | ATA TGG GGA ACC CTC AGT ATA ACT ACA AGC ACT GAG |
| | | ACC TGC CAA TAT CTG AAG GAT TAC CTG ACC AGA CTG |
| | | CTG AAT CCT TAC ATA ATC AAC |
| B4-hy3 | 8 | ATA TGG GGA ACC CTC AGT ATA TCC AGC AGT GAG GAA |
| | | GAA TGC TGG CAT TTG CAC GAT TAC CTG GTA GAC ACA |
| | | CTG AAT CCT TAC ATA ATC AAC |
| B4-hy4 | 9 | ATA TGG GGA ACC CTC AGT ATA ACC GCA TCT AAG GCA |
| | | AAC TGC ACA AAA GTA AAA CAA TTC GTC TCC AGT GAT |
| | | CTG AAT CCT TAC ATA ATC AAC |
| ALB-SP-Xho | 10 | GAA TAT CTC GAG GCC ACC ATG AAG TGG GTT ACA |
| SPAM1-6H-not | 11 | CTA ATT GCG GCC GCT CAT TAG TGG TGA TGG TGA TGA |
| | | TGG AAG AAA CCA ATT CTG C |
| op-F468-R | 12 | AAT TAG GCG GCC GCC TAT TAA AAG GCG TCG ATG CAC |
| | | ACG CCA TC |
| op-F468-6H-not | 13 | CTC TAA TTG CGG CCG CTC ATT AGT GGT GAT GGT GAT |
| | | GAT GAA AGG CGT CGA TGC ACA CGC CAT C |
| op-Xho-hSA-L | 14 | AAT TAG AGC TCG AGG CCA CCA TGA AAT GGG TGA CCT |
| | | TTA TCT CC |
| opB4-Xho-hSA | 15 | CAG ATT CTC GAG GCC ACC ATG AAA TGG G |
| op-Q347-m64 | 16 | ATC TGG GGC TCC TGG GAG AAC ACC AGG CAG AAG GAG |
| | | AGC TGC CAG GCC ATC |
| op-Q348-m65 | 17 | ATC TGG GGC TCC TGG GAG AAC ACC AGG ACC CAG GAG |
| | | AGC TGC CAG GCC ATC AAG |
| op-Q350-m66 | 18 | AGA ACA CCA GGA CCA AGG AGC AAT GCC AGG CCA TCA |
| | | AGG AGT AC |
| op-Q355-m67 | 19 | AGG AGA GCT GCC AGG CCA TCC AGG AGT ACA TGG ACA |
| | | CAA CCC TG |
| op-V358-m69 | 20 | AGC TGC CAG GCC ATC AAG GAG TAC GTG GAC ACA ACC |
| | | CTG AAC CCT TAT ATC |
| op-A362-m70 | 21 | AGG AGT ACA TGG ACA CAA CCG CGA ACC CTT ATA TCA |
| | | TCA ATG |
| op-V343-m71 | 22 | ATC GTG ATC TGG GGC TCC TGG GTG AAC ACC AGG ACC |
| | | AAG GAG AG |
| op-F344-m72 | 23 | ATC TGG GGC TCC TGG GAG TTC ACC AGG ACC AAG GAG |
| | | AGC TG |
| op-K359-mega- | 24 | AGC TGC CAG GCC ATC AAG GAG TAC ATG AAA ACA ACC |
| NL73 | | CTG AAC CCT TAT ATC |
| op-Y360-m74 | 25 | ATC AAG GAG TAC ATG GAC TAC ACC CTG AAC CCT TAT |
| | | ATC ATC |
| op-M361-m75 | 26 | ATC AAG GAG TAC ATG GAC ACA ATG CTG AAC CCT TAT |
| | | ATC ATC |
| op-E352-m76 | 27 | ACC AGG ACC AAG GAG AGC TGC GAG GCC ATC AAG GAG |
| | | TAC ATG G |
| op-M363-m77 | 28 | AGT ACA TGG ACA CAA CCC TGA TGC CTT ATA TCA TCA |
| | | ATG TGA C |
| op-N84-m78 | 29 | TAG AAG ATT GTC ACG CCC TGG CCG TTG GCA TTG ATC |
| | | CGA GGA GAG C |
| op-K166-m79 | 30 | TGC ACC AGC TCG ATG GAC CGT TTC TTA TAC ACG TCC |
| | | TTA GGC TTC |
| op-354E-m82 | 31 | ACC AAG GAG AGC TGC CAG GCC GAA AAG GAG TAC ATG |
| | | GAC ACA ACC |
| op-354Q-m83 | 32 | ACC AAG GAG AGC TGC CAG GCC CAA AAG GAG TAC ATG |
| | | GAC ACA ACC |
| op-354S-m84 | 33 | ACC AAG GAG AGC TGC CAG GCC TCT AAG GAG TAC ATG |
| | | GAC ACA ACC |
| op-354V-m85 | 34 | ACC AAG GAG AGC TGC CAG GCC GTC AAG GAG TAC ATG |
| | | GAC ACA ACC |
| op-354A-m86 | 35 | ACC AAG GAG AGC TGC CAG GCC GCG AAG GAG TAC ATG |
| | | GAC ACA ACC |
| op-354N-m88 | 36 | ACC AAG GAG AGC TGC CAG GCC AAC AAG GAG TAC ATG |
| | | GAC ACA ACC |
| op-354T-m89 | 37 | ACC AAG GAG AGC TGC CAG GCC ACC AAG GAG TAC ATG |
| | | GAC ACA ACC |
| op-356M-m90 | 38 | AAG GAG AGC TGC CAG GCC ATC AAG ATG TAC ATG GAC |
| | | ACA ACC CTG AAC |
| op-356F-m91 | 39 | AAG GAG AGC TGC CAG GCC ATC AAG TTC TAC ATG GAC |
| | | ACA ACC CTG AAC |
| op-356I-m92 | 40 | AAG GAG AGC TGC CAG GCC ATC AAG ATA TAC ATG GAC |
| | | ACA ACC CTG AAC |
| op-356L-m93 | 41 | AAG GAG AGC TGC CAG GCC ATC AAG TTG TAC ATG GAC |
| | | ACA ACC CTG AAC |
| op-356Q-m94 | 42 | AAG GAG AGC TGC CAG GCC ATC AAG CAG TAC ATG GAC |
| | | ACA ACC CTG AAC |
| op-356V-m95 | 43 | AAG GAG AGC TGC CAG GCC ATC AAG GTA TAC ATG GAC |
| | | ACA ACC CTG AAC |
| op- | 44 | ATC GTG ATC TGG GGC TCC TGG GTG AAC ACC AGG ACC |
| 343V_364M- | | AAG GAG AGC TGC CAG GCC ATC AAG GAG TAC ATG GAC |
| m96 | | ACA ATG CTG AAC CCT TAT ATC ATC |
| op-340Q-m97 | 45 | AGC TAG CGG CAT CGT GAT CTG GCA ATC CTG GGA GAA |
| | | CAC CAG GAC C |
| op-341H-m98 | 46 | AGC GGC ATC GTG ATC TGG GGC CAC TGG GAG AAC ACC |
| | | AGG ACC AAG |
| op-342I-m99 | 47 | AGC GGC ATC GTG ATC TGG GGC TCC ATT GAG AAC ACC |
| | | AGG ACC AAG GAG |
| op-343Y-m100 | 48 | ATC GTG ATC TGG GGC TCC TGG TAT AAC ACC AGG ACC |
| | | AAG GAG AG |
| op-345E-m101 | 49 | ATC GTG ATC TGG GGC TCC TGG GAG AAC GAA AGG ACC |
| | | AAG GAG AGC TGC C |
| op-346F-m102 | 50 | ATC TGG GGC TCC TGG GAG AAC ACC TTC ACC AAG GAG |
| | | AGC TGC CAG GC |
| op-347E-m103 | 51 | ATC TGG GGC TCC TGG GAG AAC ACC AGG GAA AAG GAG |
| | | AGC TGC CAG GCC ATC |
| op-349L-m104 | 52 | ATC TGG GGC TCC TGG GAG AAC ACC AGG ACC AAG TTG |
| | | AGC TGC CAG GCC ATC AAG G |
| op-350I-m105 | 53 | AGA ACA CCA GGA CCA AGG AGA TCT GCC AGG CCA TCA |
| | | AGG AG |
| op-352G-m106 | 54 | ACC AGG ACC AAG GAG AGC TGC GGG GCC ATC AAG GAG |
| | | TAC ATG GAC |
| op-354R-m107 | 55 | ACC AAG GAG AGC TGC CAG GCC AGA AAG GAG TAC ATG |
| | | GAC ACA AC |
| op-358R-m110 | 56 | AGC TGC CAG GCC ATC AAG GAG TAC CGG GAC ACA ACC |
| | | CTG AAC CCT TAT ATC |
| op-359V-m111 | 57 | AGG CCA TCA AGG AGT ACA TGG TCA CAA CCC TGA ACC |
| | | CTT ATA TC |
| op-360R-m112 | 58 | AGG CCA TCA AGG AGT ACA TGG ACA GAA CCC TGA ACC |
| | | CTT ATA TCA TC |
| op-345K-m114 | 59 | ATC TGG GGC TCC TGG GAG AAC AAG AGG ACC AAG GAG |
| | | AGC TGC CAG |
| op-346L-m115 | 60 | ATC TGG GGC TCC TGG GAG AAC ACC CTG ACC AAG GAG |
| | | AGC TGC CAG GC |
| op-347V-m116 | 61 | ATC TGG GGC TCC TGG GAG AAC ACC AGG GTC AAG GAG |
| | | AGC TGC CAG GCC ATC |
| op-349W-m117 | 62 | ATC TGG GGC TCC TGG GAG AAC ACC AGG ACC AAG TGG |
| | | AGC TGC CAG GCC ATC AAG GAG |
| op-354W-m118 | 63 | ACC AAG GAG AGC TGC CAG GCC TGG AAG GAG TAC ATG |
| | | GAC ACA AC |
| op-359Y-m121 | 64 | AGG CCA TCA AGG AGT ACA TGT ACA CAA CCC TGA ACC |
| | | CTT ATA TC |
| op-347W-m125 | 65 | ATC TGG GGC TCC TGG GAG AAC ACC AGG TGG AAG GAG |
| | | AGC TGC CAG GCC ATC |
| op-357W-m126 | 66 | AGC TGC CAG GCC ATC AAG GAG TGG ATG GAC ACA ACC |
| | | CTG AAC CC |
| op-342D-m130 | 67 | AGC GGC ATC GTG ATC TGG GGC TCC GAC GAG AAC ACC |
| | | AGG ACC AAG GAG |
| op-343Q-m131 | 68 | ATC GTG ATC TGG GGC TCC TGG CAG AAC ACC AGG ACC |
| | | AAG GAG AGC |
| op-347H-m132 | 69 | ATC TGG GGC TCC TGG GAG AAC ACC AGG CAC AAG GAG |
| | | AGC TGC CAG GCC ATC |
| op-348F-m133 | 70 | ATC TGG GGC TCC TGG GAG AAC ACC AGG ACC TTC GAG |
| | | AGC TGC CAG GCC ATC AAG |
| op-350D-m134 | 71 | AGA ACA CCA GGA CCA AGG AGG ACT GCC AGG CCA TCA |
| | | AGG AGT AC |
| op-352Y-m135 | 72 | ACC AGG ACC AAG GAG AGC TGC TAC GCC ATC AAG GAG |
| | | TAC ATG GAC AC |
| op-353E-m136 | 73 | AGG ACC AAG GAG AGC TGC CAG GAA ATC AAG GAG TAC |
| | | ATG GAC AC |
| op-358Y-m138 | 74 | AGC TGC CAG GCC ATC AAG GAG TAC TAC GAC ACA ACC |
| | | CTG AAC CCT TAT ATC |
| op-359Q-m139 | 75 | AGG CCA TCA AGG AGT ACA TGC AGA CAA CCC TGA ACC |
| | | CTT ATA TC |
| op-360L-m140 | 76 | AGG CCA TCA AGG AGT ACA TGG ACC TAA CCC TGA ACC |
| | | CTT ATA TCA TC |
| op-361E-m141 | 77 | ATC AAG GAG TAC ATG GAC ACA GAG CTG AAC CCT TAT |
| | | ATC ATC AAT G |
| op-363E-m142 | 78 | AGT ACA TGG ACA CAA CCC TGG AGC CTT ATA TCA TCA |
| | | ATG TGA C |
| op-342H-m143 | 79 | AGC GGC ATC GTG ATC TGG GGC TCC CAT GAG AAC ACC |
| | | AGG ACC AAG GAG |
| op-348D-m144 | 80 | ATC TGG GGC TCC TGG GAG AAC ACC AGG ACC GAC GAG |
| | | AGC TGC CAG GCC ATC AAG |
| op-361H-m145 | 81 | ATC AAG GAG TAC ATG GAC ACA CAC CTG AAC CCT TAT |
| | | ATC ATC AAT G |
| Op-R39-m146- | 82 | TTT GGA ATC ACA GGA GGA GCC CGA GAG TAT GCG GAG |
| R | | CTA AAC AG |
| Op-A40-m147- | 83 | TTT GGA ATC ACA GGA GGA GCA GAG TAT GCG GAG CTA |
| R | | AAC AG |
| op-D456-6H- | 84 | CTC TAA TTG CGG CCG CCT ATT AGT GGT GAT GGT GAT |
| not | | GAT GGT CCA CGG CAT CTG TGT CCT TC |
| op-350Q360R- | 85 | AGA ACA CCA GGA CCA AGG AGC AGT GCC AGG CCA TCA |
| m150 | | AGG AGT ACA TGG ACC GAA CCC TGA ACC CTT ATA TCA TC |
| Op-m152- | 86 | TAA AAG AGA ACA GGC TCA TAT CCA GGG GCT CGG CAA |
| D65A-R | | ACT TGC CCA GGC AGA ACT C |
| Op-m153- | 87 | TAA AAG AGA ACA GGC TCA TAT CCA GGG GCG CGT CAA |
| E66A-R | | ACT TGC CCA GGC AGA AC |
| Op-m154- | 88 | TAA AAG AGA ACA GGC TCA TAT CCA GGG CCT CGT CAA |
| P67A-R | | ACT TGC CCA GGC |
| Op-m155- | 89 | TAA AAG AGA ACA GGC TCA TAT CCG CGG GCT CGT CAA |
| L68A-R | | ACT TGC CCA G |
| op-311A-m156 | 90 | ACC AGG ATC GTG TTT ACA GAC GCG GTG CTG AAG TTC |
| | | CTG TCC |
| op-312A-m157 | 91 | AGG ATC GTG TTT ACA GAC CAG GCG CTG AAG TTC CTG |
| | | TCC CAG |
| op-313A-m158 | 92 | ATC GTG TTT ACA GAC CAG GTG GCG AAG TTC CTG TCC |
| | | CAG GAT |
| op-314A-m159 | 93 | ATC GTG TTT ACA GAC CAG GTG CTG GCG TTC CTG TCC |
| | | CAG GAT GAG |
| N266A-m160 | 94 | GCC CTG TAC CCT AGC ATC TAT CTG GCC ACC CAG CAG |
| | | AGC CCA GTG GC |
| T267A-m161 | 95 | CTG TAC CCT AGC ATC TAT CTG AAC GCC CAG CAG AGC |
| | | CCA GTG GCC GCT AC |
| Q268A-m162 | 96 | TAC CCT AGC ATC TAT CTG AAC ACC GCG CAG AGC CCA |
| | | GTG GCC GCT ACA CTG |
| Q269A-m163 | 97 | TAC CCT AGC ATC TAT CTG AAC ACC CAG GCG AGC CCA |
| | | GTG GCC GCT ACA CTG TAT G |
| P271A-m164 | 98 | AGC ATC TAT CTG AAC ACC CAG CAG AGC GCA GTG GCC |
| | | GCT ACA CTG TAT GTG AGG |
| V272A-m165 | 99 | TAT CTG AAC ACC CAG CAG AGC CCA GCG GCC GCT ACA |
| | | CTG TAT GTG AGG |
| Op-m166- | 100 | TGT CAC TCC GGT GAT AGA ATC GGC ATA TGG ATA GTA |
| I102A-R | | GCC CAG TCT G |
| Op-m167- | 101 | TCA CTG TCA CTC CGG TGA TAG AAG CGA TAT ATG GAT |
| D103A-R | | AGT AGC CCA G |
| Op-m168- | 102 | TCC GTT CAC TGT CAC TCC GGT GAT AGC ATC GAT ATA |
| S104A-R | | TGG ATA GTA GCC CAG |
| Op-m169- | 103 | TCC GTT CAC TGT CAC TCC GGT GGC AGA ATC GAT ATA |
| I105A-R | | TGG ATA GTA GC |
| op-m170- | 104 | TTG TCC ACT GGC ATG TAG AAG GCG ATG TCC TTC TTA |
| T132A-R | | GCC TTA TC |
| op-m171- | 105 | TGC CCA GAT TGT CCA CTG GCA TGT AGG CGG TGA TGT |
| F133A-R | | CCT TCT TAG CCT TAT C |
| op-m172- | 106 | TGC CCA GAT TGT CCA CTG GCA TGG CGA AGG TGA TGT |
| Y134A-R | | CCT TCT TAG |
| V241A-m173 | 107 | AGA TCG TCG TTC CTC TTG ATC TCC GCA TTG AAA CAG |
| | | GAG CCG TTG TAG CC |
| E242A-m174 | 108 | GAC AGA TCG TCG TTC CTC TTG ATC GCC ACA TTG AAA |
| | | CAG GAG CCG TTG TAG CC |
| I243A-m175 | 109 | AGC CAA GAC AGA TCG TCG TTC CTC TTG GCC TCC ACA |
| | | TTG AAA CAG GAG CCG TTG |
| K244A-m176 | 110 | AGC CAA GAC AGA TCG TCG TTC CTC GCG ATC TCC ACA |
| | | TTG AAA CAG GAG CCG |
| Op-m177- | 111 | TCT GTG GCC TCG GTC AGG CTC GCC TGC ACG TTC TGC |
| L179A-R | | TGC TGC AC |
| Op-m178- | 112 | TTC TCT GTG GCC TCG GTC AGG GCC AGC TGC ACG TTC |
| S180A-R | | TGC TGC TG |
| Op-m179- | 113 | TAG CCT TCT CTG TGG CCT CGG TCG CGC TCA GCT GCA |
| L181A-R | | CGT TCT GCT G |
| Op-m180- | 114 | TTA GCC TTC TCT GTG GCC TCG GCC AGG CTC AGC TGC |
| T182A-R | | ACG TTC TG |
| Op-m181- | 115 | TCG AAC TCC TGC TTA GCC TTC TCT GCG GCC TCG GTC |
| T185A-R | | AGG CTC AGC TG |
| Op-m182- | 116 | TCG AAC TCC TGC TTA GCC TTC GCT GTG GCC TCG GTC |
| E186A-R | | AGG CTC AG |
| Op-m183- | 117 | TTC TCG AAC TCC TGC TTA GCC GCC TCT GTG GCC TCG GTC |
| K187A-R | | AGG C |
| op-K290A- | 118 | AGA GAG GCT ATC CGC GTG TCT GCG ATC CCC GAC GCC |
| m184 | | AAG TCC CCA C |
| op-I291A-m185 | 119 | AGG CTA TCC GCG TGT CTA AGG CCC CCG ACG CCA AGT |
| | | CCC CAC TG |
| op-P292A- | 120 | AGG CTA TCC GCG TGT CTA AGA TCG CCG ACG CCA AGT |
| m186 | | CCC CAC TGC CC |
| L441A-m190 | 121 | AGT TTT ACT GCT CTT GTT ATT CCA CCG CGA GCT GTA |
| | | AGG AGA AGG CTG ATG |
| S442A-m191 | 122 | ACT GCT CTT GTT ATT CCA CCC TGG CCT GTA AGG AGA |
| | | AGG CTG ATG TG |
| op-D451A- | 123 | AAG GAG AAG GCT GAT GTG AAG GCC ACA GAT GCC GTG |
| m192 | | GAC GTG TGC |
| op-T452A- | 124 | AAG GAG AAG GCT GAT GTG AAG GAC GCA GAT GCC GTG |
| m193 | | GAC GTG TGC ATC |
| op-D453A- | 125 | AAG GCT GAT GTG AAG GAC ACA GCT GCC GTG GAC GTG |
| m194 | | TGC ATC G |
| op-D461A-6H- | 126 | ATA TTC GCG GCC GCC TAT TAG TGG TGA TGG TGA TGA |
| not | | TGA AAG GCG TCG ATG CAC ACG CCA GCA GCG ATG CAC |
| | | ACG TCC ACG |
| op-G462A-6H- | 127 | ATA TTC GCG GCC GCC TAT TAG TGG TGA TGG TGA TGA |
| not | | TGA AAG GCG TCG ATG CAC ACG GCA TCA GCG ATG CAC |
| | | ACG TCC AC |
| op-V463A-6H- | 128 | ATA TTC GCG GCC GCC TAT TAG TGG TGA TGG TGA TGA |
| not | | TGA AAG GCG TCG ATG CAC GCG CCA TCA GCG ATG CAC |
| | | ACG |
| op-N82A- | 129 | TGT CAC GCC CTG GCC GGT GGC AGC GAT CCG AGG AGA |
| m198-R | | GCC GAT AAA AG |
| op-N166A- | 130 | TGC ACC AGC TCG ATG GAC CGA GCC TTA TAC ACG TCC |
| m199-R | | TTA GGC TTC |
| Op-S104N- | 131 | TTC ACT GTC ACT CCG GTG ATA TTA TCG ATA TAT GGA |
| m203-R | | TAG TAG CC |
| Op-I105Q- | 132 | TCC GTT CAC TGT CAC TCC GGT CTG AGA ATC GAT ATA |
| m204-R | | TGG ATA GTA GC |
| op-Q268D- | 133 | ACC CTA GCA TCT ATC TGA ACA CCG ATC AGA GCC CAG |
| m205-F | | TGG CCG CTA C |
| op-Q268I- | 134 | ACC CTA GCA TCT ATC TGA ACA CCA TCC AGA GCC CAG |
| m208-F | | TGG CCG CTA C |
| op-291G-m210- | 135 | AGG CTA TCC GCG TGT CTA AGG GCC CCG ACG CCA AGT |
| F | | CCC CAC |
| op-292D-m211- | 136 | ATC CGC GTG TCT AAG ATC GAC GAC GCC AAG TCC CCA |
| F | | CTG C |
| op-T452D- | 137 | AGA AGG CTG ATG TGA AGG ACG ACG ATG CCG TGG ACG |
| m212 | | TGT G |
| op-T452H- | 138 | AGA AGG CTG ATG TGA AGG ACC ACG ATG CCG TGG ACG |
| m213 | | TGT G |
| op-T452K- | 139 | AGA AGG CTG ATG TGA AGG ACA AAG ATG CCG TGG ACG |
| m214 | | TGT G |
| Op-T452G- | 140 | AGA AGG CTG ATG TGA AGG ACG GAG ATG CCG TGG ACG |
| m216 | | TGT G |
| Op-T452P- | 141 | AGA AGG CTG ATG TGA AGG ACC CAG ATG CCG TGG ACG |
| m217 | | TGT G |
| op-T452M- | 142 | AGA AGG CTG ATG TGA AGG ACA TGG ATG CCG TGG ACG |
| m218 | | TGT G |
| op-T452F-m219 | 143 | AGA AGG CTG ATG TGA AGG ACT TCG ATG CCG TGG ACG |
| | | TGT G |
| op-D461R-6H- | 144 | CTC TAA TTG CGG CCG CCT ATT AGT GGT GAT GGT GAT |
| not-m220 | | GAT GAA AGG CGT CGA TGC ACA CGC CCC TAG CGA TGC |
| | | ACA CGT CCA C |
| op-V463Y-6H- | 145 | CTC TAA TTG CGG CCG CTC ATT AGT GGT GAT GGT GAT |
| not-m231 | | GAT GAA AGG CGT CGA TGC AGT AGC CAT CAG CGA TGC |
| | | ACA C |
| op-S180T-R- | 146 | TTC TCT GTG GCC TCG GTC AGG GTC AGC TGC ACG TTC |
| m232 | | TGC TGC TG |
| op-D451S-F- | 147 | AGG AGA AGG CTG ATG TGA AGA GCA CAG ATG CCG TGG |
| m233 | | ACG TG |
| op-L313P- | 148 | ATC GTG TTT ACA GAC CAG GTG CCG AAG TTC CTG TCC |
| m234-F | | CAG GAT GAG |
| op-L313M- | 149 | ATC GTG TTT ACA GAC CAG GTG ATG AAG TTC CTG TCC |
| m235-F | | CAG GAT GAG |
| op-L179S- | 150 | TCT GTG GCC TCG GTC AGG CTC GAC TGC ACG TTC TGC |
| m243-R | | TGC TGC AC |
| op-L179I- | 151 | TCT GTG GCC TCG GTC AGG CTA ATC TGC ACG TTC TGC |
| m245-R | | TGC TGC AC |
| op-L179F- | 152 | TCT GTG GCC TCG GTC AGG CTA AAC TGC ACG TTC TGC |
| m246-R | | TGC TGC AC |
| FQQ-Mega- | 153 | ATC GTG ATC TGG GGC TCC TGG GAG TTC ACC AGG ACC |
| m254 | | CAG GAG AGC TGC CAG GCC ATC CAG GAG TAC ATG GAC |
| | | ACA ACC CTG AAC |
| op-Q268N- | 154 | ACC CTA GCA TCT ATC TGA ACA CCA ACC AGA GCC CAG |
| m259-m | | TGG CCG CTA C |
| B4-124-R | 155 | GCC CAG GCA GAA CTC GC |
| op- | 156 | TCT CGA ACT CCT GCT TAG CCT TAT CTG TGG CCT CGG TCA |
| L181M, E186D- | | TGC TCA GCT GCA CGT TCT GCT GC |
| m266 | | |
| op-Q268A- | 157 | ACC CTA GCA TCT ATC TGA ACA CCG CGC AGA GCC CAG |
| m268-m | | TGG CCG CTA C |
| op-344I, 348M- | 158 | ATC GTG ATC TGG GGC TCC TGG GAG ATC ACC AGG ACC |
| m271 | | ATG GAG AGC TGC CAG GCC ATC AAG |
| op-DLSS-m275 | 159 | AGC GGC ATC GTG ATC TGG GGC GAC CTG TCG ATC TCC |
| | | TCG ACC ATG GAG AGC TGC CAG GCC |
| op-DLS-m276 | 160 | AGC GGC ATC GTG ATC TGG GGC GAC CTG TCG ATC TCC |
| | | AGG ACC ATG GAG AGC TGC CAG |
| Op-K348M- | 161 | ATC TGG GGC TCC TGG GAG AAC ACC AGG ACC ATG GAG |
| m279 | | AGC TGC CAG GCC ATC AAG |
| Op-N344I | 162 | ATC GTG ATC TGG GGC TCC TGG GAG ATC ACC AGG ACC |
| K348M-m280 | | ATG GAG AGC TGC CAG GCC ATC AAG |

[0114] After finding a PH20 variant with increased enzymatic activity and thermal stability, the His-tag-free cDNA of the PH20 variant was also constructed.

[0115] The PH20 variant was constructed as follows using cDNA of the PH20 variant.

[0116] The expression of the variant was performed using the ExpiCHO expression system. When the cell density of ExpiCHO cells reached 6×10⁶/mL, a plasmid including the wild-type or variant PH20 cDNA inserted in the pcDNA3.4-TOPO vector was transfected into the ExpiCHO cells using ExpiFectamine CHO reagent. As a cell culture medium, ExpiCHO expression medium (100 to 500 mL) was used. After transfection, the ExpiCHO cells were cultured with shaking at 130 rpm for a total of 6 days, during which the cells were cultured at 37° C. for 1 day and were further cultured at a lower temperature of 32° C. for 5 days. After completion of the culture, the cell supernatant was collected by centrifugation at 10,000 rpm for 30 min.

[0117] The recombinant proteins of the C-terminal His-tag-attached wild-type PH20 and variant PH20, produced in the ExpiCHO cells, were purified through three-step column chromatography using an AKTA prime system (GE Healthcare Systems), and the three-step column chromatography was performed using a HisTrap HP column-Q Sepharose column-phenyl HP column, and a Q Sepharose column-HisTrap HP column-butyl HP column, respectively, depending on the variant.

[0118] The purification using the HisTrap HP column, the Q Sepharose column and the phenyl HP column was performed as follows. For protein purification using the HisTrap column, buffer A (20 mM sodium phosphate, pH 7.5, 0.5 M NaCl) and buffer B (20 mM sodium phosphate, pH 7.5, 0.5 M NaCl, 0.5 M imidazole) were prepared. The protein was bound to the HisTrap column, and the column was flushed with 5 column volumes (CV) of buffer A to remove non-specifically bound proteins. It was confirmed that the conductivity was maintained at a constant level, and then the column was flushed with 5 CV of 20% buffer B to elute the protein. The eluted protein was dialyzed with dialysis buffer (20 mM sodium phosphate, pH 7.5, 50 mM NaCl). For protein purification using the Q Sepharose column, buffer A (20 mM sodium phosphate, pH 7.5) and buffer B (20 mM sodium phosphate, pH 7.5, 0.5 M NaCl) were prepared. The protein was bound to the Q Sepharose column, and the column was flushed with 5 CV of buffer A to remove nonspecifically bound proteins, and then was flushed with 5 CV of buffer B at a concentration gradient of 0 to 100% to elute the protein. For protein purification using the phenyl HP column, buffer A (20 mM sodium phosphate, pH 7.0, 1.5 M (NH₄)₂SO₄) and buffer B (20 mM sodium phosphate, pH 7.0) were prepared. The protein was bound to the phenyl column, and the column was flushed with 5 CV of buffer A to remove nonspecifically bound proteins, and then was flushed with 5 CV of buffer B at a concentration gradient of 0 to 100% to elute the protein.

[0119] The purification using the Q Sepharose column, the HisTrap HP column and the butyl HP column was performed as follows. For protein purification using the Q Sepharose column, buffer A (20 mM NaPi, 15 mM NaCl, pH 8.0) and buffer B (20 mM NaPi, 500 mM NaCl, pH 8.0) were prepared. To adjust the pH and conductivity of the culture solution to be the same as Buffer A, the pH was titrated to 8 using 1 M Tris buffer, and the conductivity was adjusted to 5 mS/cm or less by adding water (PW) thereto. Then, the culture solution was filtered through a membrane having 0.22-μm pores therein. The protein was bound to the Q Sepharose column, and the column was flushed with 5 CV of buffer A to remove nonspecifically bound proteins and was then flushed with 5 CV of buffer B to elute the target protein. For protein purification using the HisTrap HP column, buffer A (20 mM NaPi, 500 mM NaCl, pH 7.5) and buffer B (20 mM NaPi, 500 mM NaCl, 500 mM Imidazole, pH 7.5) were prepared. The protein sample was bound to the HisTrap HP column, the column was flushed with 10 CV of 7% buffer B to remove non-specifically bound proteins, and the column was then flushed with 3 CV of 40% buffer B to elute the protein. For protein purification using the butyl HP column, buffer A (20 mM NaPi, 1.5 M Ammonium sulfate, pH 7.0) and buffer B (20 mM NaPi, pH 7.0) were prepared. A 3 M ammonium sulfate solution and a protein sample to be loaded onto the column were mixed in a ratio of 1:1 and then the resulting mixture was filtered through a membrane having 0.22-μm pores therein. The protein sample was bound to the butyl HP column, and the column was flushed with 5 CV of buffer A to remove impurities. Then, the target protein was eluted with a linear concentration gradient of 0-100% buffer B, and was dialyzed using a dialysis buffer (20 mM NaPi, 100 mM NaCl, pH 7.0). The variant according to the present invention was purified by the method suggested in the present invention, 10% SDS-PAGE analysis was performed on each purified product, and the results are shown in FIGS. 1 and 3.

[0120] The enzymatic activities of wild-type PH20 and variant PH20 were measured by turbidimetric assay.

[0121] The turbidimetric assay is a method of measuring the absorbance in the precipitate that is produced when hyaluronic acid is mixed with albumin (BSA). When hyaluronic acid is hydrolyzed by PH20, the absorbance of the precipitate that is produced upon mixing with albumin decreases. The turbidimetric assay is generally performed as follows. Hyaluronidase PH20 (Sigma) was diluted to 1, 2, 5, 7.5, 10, 15, 20, 30, 50 and 60 units/mL and prepared in each tube. The purified protein sample was dissolved in an enzyme diluent buffer (20 mM Tris·HCl, pH 7.0, 77 mM NaCl, 0.01% (w/v) bovine serum albumin), diluted to 100×, 300×, 600×, 1200× and 2400×, and prepared in respective tubes. In fresh tubes, the hyaluronic acid solution having a concentration of 3 mg/mL was diluted 10-fold to a concentration of 0.3 mg/mL so that the volume in each tube became 180 μL. 60 μL of enzyme was added to and mixed with the diluted hyaluronic acid solution and allowed to react at 37° C. for 45 minutes. After completion of the reaction, 50 μL of the reacted enzyme and 250 μL of acidic albumin solution were added to each well of a 96-well plate and shaken for 10 minutes, and then the absorbance was measured at 600 nm using a spectrophotometer.

[0122] Methods of measuring the thermal stability of the protein include a method of measuring the aggregation temperature by dynamic light scattering (DLS), a method of measuring the melting temperature (Tₘ) in real-time PCR using Sypro-Orange dye, and a method of measuring the enzymatic activity after allowing the protein to stand at a predetermined temperature for a predetermined time, etc. In the method of measuring the aggregation temperature by DLS, the aggregation of molecules is measured using light scattering, and thus the sensitivity is high and the aggregation temperature is generally lower than the melting temperature of the protein. Since each variant is prepared as a solution of the same concentration of 0.2 mg/mL and is then measured, the physical properties of each variant can be compared using the resulting value as the aggregation temperature (Philo, J. S. (2009) Cur. Pharm. Biotech. 10, 359-372).

[0123] The amino acid sequences of the PH20 variants constructed by substitution or cleavage of the amino acids from the PH20 variant having the sequence of SEQ ID NO: 3 in the present invention are shown in Table 6 below.

[0124] In the present invention, the experiment was conducted on a variant in which six histidines were added for protein purification at the C-terminus in the sequence shown in Table 6. It was found that this addition to the C-terminus did not affect the enzyme activity or protein stability. The variant according to the present invention was named as a combination of HM and serial number, and the variants according to Example 3 were named “Hyal2-variant”, “Hyal3-variant”, and “Hyal4-variant”.

TABLE 6
Amino acid sequences of PH20 variants according to present
invention and substitution/cleavage characteristics thereof

| | SEQ | | |
|---|---|---|---|
| | ID | | |
| Name | NO | Substitution | Sequence |
| Hya12- | 163 | 15 amino acid residues | LNFRAPPVIPNVPFLWAWNAPSEFCLGKF |
| variant | | S341T, W342L, E343S, | DEPLDMSLFSFIGSPRINATGQGVTIFYVD |
| | | N344I, R346T, T347S, | RLGYYPYIDSITGVTVNGGIPQKISLQDHL |
| | | K348T, S350T, A353Y, | DKAKKDITFYMPVDNLGMAVIDWEEWR |
| | | I354L, E356D, M358L, | PTWARNWKPKDVYKNRSIELVQQQNVQ |
| | | D359T and T360R, | LSLTEATEKAKQEFEKAGKDFLVETIKLG |
| | | T361L are substituted | KLLRPNHLWGYYLFPDCYNHHYKKPGY |
| | | from SEQ ID NO: 3, | NGSCFNVEIKRNDDLSWLWNESTALYPSI |
| | | cleavage occurs before | YLNTQQSPVAATLYVRNRVREAIRVSKIP |
| | | amino acid residue L36 | DAKSPLPVFAYTRIVFTDQVLKFLSQDEL |
| | | at N-terminus of PH20, | VYTFGETVALGASGIVIWGTLSITTSTET |
| | | and cleavage occurs | CQYLKDYLTRLLNPYIINVTLAAKMCSQ |
| | | after amino acid residue | VLCQEQGVCIRKNWNSSDYLHLNPDNFA |
| | | S490 at C-terminus of | IQLEKGGKFTVRGKPTLEDLEQFSEKFYC |
| | | PH20. | SCYSTLSCKEKADVKDTDAVDVCIADGV |
| | | | CIDAFLKPPMETEEPQIFYNASPSTLS |
| Hya13- | 164 | 17 amino acid residues | LNFRAPPVIPNVPFLWAWNAPSEFCLGKF |
| variant | | S341T, W342L, E343S, | DEPLDMSLFSFIGSPRINATGQGVTIFYVD |
| | | N344I, T345S, R346S, | RLGYYPYIDSITGVTVNGGIPQKISLQDHL |
| | | T347S, K348E, S350E, | DKAKKDITFYMPVDNLGMAVIDWEEWR |
| | | Q352W, A353H, | PTWARNWKPKDVYKNRSIELVQQQNVQ |
| | | I354L, K355H, E356D, | LSLTEATEKAKQEFEKAGKDFLVETIKLG |
| | | M358L, D359V and | KLLRPNHLWGYYLFPDCYNHHYKKPGY |
| | | T360D are substituted | NGSCFNVEIKRNDDLSWLWNESTALYPSI |
| | | from SEQ ID NO: 3, | YLNTQQSPVAATLYVRNRVREAIRVSKIP |
| | | cleavage occurs before | DAKSPLPVFAYTRIVFTDQVLKFLSQDEL |
| | | amino acid residue L36 | VYTFGETVALGASGIVIWGTLSISSSEEEC |
| | | at N-terminus of PH20, | WHLHDYLVDTLNPYIINVTLAAKMCSQV |
| | | and cleavage occurs | LCQEQGVCIRKNWNSSDYLHLNPDNFAI |
| | | after amino acid residue | QLEKGGKFTVRGKPTLEDLEQFSEKFYCS |
| | | S490 at C-terminus of | CYSTLSCKEKADVKDTDAVDVCIADGVC |
| | | PH20. | IDAFLKPPMETEEPQIFYNASPSTLS |
| Hya14- | 165 | 17 amino acid residues | LNFRAPPVIPNVPFLWAWNAPSEFCLGKF |
| variant | | S341T, W342L, E343S, | DEPLDMSLFSFIGSPRINATGQGVTIFYVD |
| | | N344I, R346A, T347S, | RLGYYPYIDSITGVTVNGGIPQKISLQDHL |
| | | E349A, S350N, Q352T, | DKAKKDITFYMPVDNLGMAVIDWEEWR |
| | | A353K, I354V, E356Q, | PTWARNWKPKDVYKNRSIELVQQQNVQ |
| | | Y357F, M358V, | LSLTEATEKAKQEFEKAGKDFLVETIKLG |
| | | D359S, T360S and | KLLRPNHLWGYYLFPDCYNHHYKKPGY |
| | | T361D are substituted | NGSCFNVEIKRNDDLSWLWNESTALYPSI |
| | | from SEQ ID NO: 3, | YLNTQQSPVAATLYVRNRVREAIRVSKIP |
| | | cleavage occurs before | DAKSPLPVFAYTRIVFTDQVLKFLSQDEL |
| | | amino acid residue L36 | VYTFGETVALGASGIVIWGTLSITASKAN |
| | | at N-terminus of PH20, | CTKVKQFVSSDLNPYIINVTLAAKMCSQ |
| | | and cleavage occurs | VLCQEQGVCIRKNWNSSDYLHLNPDNFA |
| | | after amino acid residue | IQLEKGGKFTVRGKPTLEDLEQFSEKFYC |
| | | S490 at C-terminus of | SCYSTLSCKEKADVKDTDAVDVCIADGV |
| | | PH20. | CIDAFLKPPMETEEPQIFYNASPSTLS |
| HM63 | 166 | One amino acid residue | FRAPPVIPNVPFLWAWNAPSEFCLGKFDE |
| | | R346M is substituted | PLDMSLFSFIGSPRINATGQGVTIFYVDRL |
| | | from SEQ ID NO: 3, | GYYPYIDSITGVTVNGGIPQKISLQDHLDK |
| | | cleavage occurs before | AKKDITFYMPVDNLGMAVIDWEEWRPT |
| | | F38 amino acid residue | WARNWKPKDVYKNRSIELVQQQNVQLS |
| | | at N-terminus of PH20, | LTEATEKAKQEFEKAGKDFLVETIKLGKL |
| | | and cleavage occurs | LRPNHLWGYYLFPDCYNHHYKKPGYNG |
| | | after F468 amino acid | SCFNVEIKRNDDLSWLWNESTALYPSIYL |
| | | residue at C-terminus | NTQQSPVAATLYVRNRVREAIRVSKIPDA |
| | | of PH20. | KSPLPVFAYTRIVFTDQVLKFLSQDELVY |
| | | | TFGETVALGASGIVIWGSWENTMTKESC |
| | | | QAIKEYMDTTLNPYIINVTLAAKMCSQVL |
| | | | CQEQGVCIRKNWNSSDYLHLNPDNFAIQ |
| | | | LEKGGKFTVRGKPTLEDLEQFSEKFYCSC |
| | | | YSTLSCKEKADVKDTDAVDVCIADGVCI |
| | | | DAF |
| HM64 | 167 | One amino acid | FRAPPVIPNVPFLWAWNAPSEFCLGKFDE |
| | | residue T347Q is | PLDMSLFSFIGSPRINATGQGVTIFYVDRL |
| | | substituted from SEQ | GYYPYIDSITGVTVNGGIPQKISLQDHLDK |
| | | ID NO: 3, cleavage | AKKDITFYMPVDNLGMAVIDWEEWRPT |
| | | occurs before F38 | WARNWKPKDVYKNRSIELVQQQNVQLS |
| | | amino acid residue at | LTEATEKAKQEFEKAGKDFLVETIKLGKL |
| | | N-terminus of PH20, | LRPNHLWGYYLFPDCYNHHYKKPGYNG |
| | | and cleavage occurs | SCFNVEIKRNDDLSWLWNESTALYPSIYL |
| | | after F468 amino acid | NTQQSPVAATLYVRNRVREAIRVSKIPDA |
| | | residue at C-terminus | KSPLPVFAYTRIVFTDQVLKFLSQDELVY |
| | | of PH20. | TFGETVALGASGIVIWGSWENTRQKESC |
| | | | QAIKEYMDTTLNPYIINVTLAAKMCSQVL |
| | | | CQEQGVCIRKNWNSSDYLHLNPDNFAIQ |
| | | | LEKGGKFTVRGKPTLEDLEQFSEKFYCSC |
| | | | YSTLSCKEKADVKDTDAVDVCIADGVCI |
| | | | DAF |
| HM65 | 168 | One amino acid | FRAPPVIPNVPFLWAWNAPSEFCLGKFDE |
| | | residue K348Q is | PLDMSLFSFIGSPRINATGQGVTIFYVDRL |
| | | substituted from SEQ | GYYPYIDSITGVTVNGGIPQKISLQDHLDK |
| | | ID NO: 3, cleavage | AKKDITFYMPVDNLGMAVIDWEEWRPT |
| | | occurs before F38 | WARNWKPKDVYKNRSIELVQQQNVQLS |
| | | amino acid residue at | LTEATEKAKQEFEKAGKDFLVETIKLGKL |
| | | N-terminus of PH20, | LRPNHLWGYYLFPDCYNHHYKKPGYNG |
| | | and cleavage occurs | SCFNVEIKRNDDLSWLWNESTALYPSIYL |
| | | after F468 amino acid | NTQQSPVAATLYVRNRVREAIRVSKIPDA |
| | | residue at C-terminus | KSPLPVFAYTRIVFTDQVLKFLSQDELVY |
| | | of PH20. | TFGETVALGASGIVIWGSWENTRTQESCQ |
| | | | AIKEYMDTTLNPYIINVTLAAKMCSQVLC |
| | | | QEQGVCIRKNWNSSDYLHLNPDNFAIQLE |
| | | | KGGKFTVRGKPTLEDLEQFSEKFYCSCYS |
| | | | TLSCKEKADVKDTDAVDVCIADGVCIDA |
| | | | F |
| HM66 | 169 | One amino acid residue | FRAPPVIPNVPFLWAWNAPSEFCLGKFDE |
| | | S350Q is substituted | PLDMSLFSFIGSPRINATGQGVTIFYVDRL |
| | | from SEQ ID NO: 3, | GYYPYIDSITGVTVNGGIPQKISLQDHLDK |
| | | cleavage occurs before | AKKDITFYMPVDNLGMAVIDWEEWRPT |
| | | F38 amino acid residue | WARNWKPKDVYKNRSIELVQQQNVQLS |
| | | at N-terminus of PH20, | LTEATEKAKQEFEKAGKDFLVETIKLGKL |
| | | and cleavage occurs | LRPNHLWGYYLFPDCYNHHYKKPGYNG |
| | | after F468 amino acid | SCFNVEIKRNDDLSWLWNESTALYPSIYL |
| | | residue at C-terminus | NTQQSPVAATLYVRNRVREAIRVSKIPDA |
| | | of PH20. | KSPLPVFAYTRIVFTDQVLKFLSQDELVY |
| | | | TFGETVALGASGIVIWGSWENTRTKEQC |
| | | | QAIKEYMDTTLNPYIINVTLAAKMCSQVL |
| | | | CQEQGVCIRKNWNSSDYLHLNPDNFAIQ |
| | | | LEKGGKFTVRGKPTLEDLEQFSEKFYCSC |
| | | | YSTLSCKEKADVKDTDAVDVCIADGVCI |
| | | | DAF |
| HM67 | 170 | One amino acid residue | FRAPPVIPNVPFLWAWNAPSEFCLGKFDE |
| | | K355Q is substituted | PLDMSLFSFIGSPRINATGQGVTIFYVDRL |
| | | from SEQ ID NO: 3, | GYYPYIDSITGVTVNGGIPQKISLQDHLDK |
| | | cleavage occurs before | AKKDITFYMPVDNLGMAVIDWEEWRPT |
| | | F38 amino acid residue | WARNWKPKDVYKNRSIELVQQQNVQLS |
| | | at N-terminus of PH20, | LTEATEKAKQEFEKAGKDFLVETIKLGKL |
| | | and cleavage occurs | LRPNHLWGYYLFPDCYNHHYKKPGYNG |
| | | after F468 amino acid | SCFNVEIKRNDDLSWLWNESTALYPSIYL |
| | | residue at C-terminus | NTQQSPVAATLYVRNRVREAIRVSKIPDA |
| | | of PH20. | KSPLPVFAYTRIVFTDQVLKFLSQDELVY |
| | | | TFGETVALGASGIVIWGSWENTRTKESCQ |
| | | | AIQEYMDTTLNPYIINVTLAAKMCSQVLC |
| | | | QEQGVCIRKNWNSSDYLHLNPDNFAIQLE |
| | | | KGGKFTVRGKPTLEDLEQFSEKFYCSCYS |
| | | | TLSCKEKADVKDTDAVDVCIADGVCIDA |
| | | | F |
| HM69 | 171 | One amino acid residue | FRAPPVIPNVPFLWAWNAPSEFCLGKFDE |
| | | M358V is substituted | PLDMSLFSFIGSPRINATGQGVTIFYVDRL |
| | | from SEQ ID NO: 3, | GYYPYIDSITGVTVNGGIPQKISLQDHLDK |
| | | cleavage occurs before | AKKDITFYMPVDNLGMAVIDWEEWRPT |
| | | F38 amino acid residue | WARNWKPKDVYKNRSIELVQQQNVQLS |
| | | at N-terminus of PH20 | LTEATEKAKQEFEKAGKDFLVETIKLGKL |
| | | and cleavage occurs | LRPNHLWGYYLFPDCYNHHYKKPGYNG |
| | | after F468 amino acid | SCFNVEIKRNDDLSWLWNESTALYPSIYL |
| | | residue at C-terminus | NTQQSPVAATLYVRNRVREAIRVSKIPDA |
| | | of PH20. | KSPLPVFAYTRIVFTDQVLKFLSQDELVY |
| | | | TFGETVALGASGIVIWGSWENTRTKESCQ |
| | | | AIKEYVDTTLNPYIINVTLAAKMCSQVLC |
| | | | QEQGVCIRKNWNSSDYLHLNPDNFAIQLE |
| | | | KGGKFTVRGKPTLEDLEQFSEKFYCSCYS |
| | | | TLSCKEKADVKDTDAVDVCIADGVCIDA |
| | | | F |
| HM70 | 172 | One amino acid residue | FRAPPVIPNVPFLWAWNAPSEFCLGKFDE |
| | | L362A is substituted | PLDMSLFSFIGSPRINATGQGVTIFYVDRL |
| | | from SEQ ID NO: 3, | GYYPYIDSITGVTVNGGIPQKISLQDHLDK |
| | | cleavage occurs before | AKKDITFYMPVDNLGMAVIDWEEWRPT |
| | | F38 amino acid residue | WARNWKPKDVYKNRSIELVQQQNVQLS |
| | | at N-terminus of PH20, | LTEATEKAKQEFEKAGKDFLVETIKLGKL |
| | | and cleavage occurs | LRPNHLWGYYLFPDCYNHHYKKPGYNG |
| | | after F468 amino acid | SCFNVEIKRNDDLSWLWNESTALYPSIYL |
| | | residue at C-terminus | NTQQSPVAATLYVRNRVREAIRVSKIPDA |
| | | of PH20. | KSPLPVFAYTRIVFTDQVLKFLSQDELVY |
| | | | TFGETVALGASGIVIWGSWENTRTKESCQ |
| | | | AIKEYMDTTANPYIINVTLAAKMCSQVLC |
| | | | QEQGVCIRKNWNSSDYLHLNPDNFAIQLE |
| | | | KGGKFTVRGKPTLEDLEQFSEKFYCSCYS |
| | | | TLSCKEKADVKDTDAVDVCIADGVCIDA |
| | | | F |
| HM71 | 173 | One amino acid residue | FRAPPVIPNVPFLWAWNAPSEFCLGKFDE |
| | | E343 V is substituted | PLDMSLFSFIGSPRINATGQGVTIFYVDRL |
| | | from SEQ ID NO: 3, | GYYPYIDSITGVTVNGGIPQKISLQDHLDK |
| | | cleavage occurs before | AKKDITFYMPVDNLGMAVIDWEEWRPT |
| | | F38 amino acid residue | WARNWKPKDVYKNRSIELVQQQNVQLS |
| | | at N-terminus of PH20, | LTEATEKAKQEFEKAGKDFLVETIKLGKL |
| | | and cleavage occurs | LRPNHLWGYYLFPDCYNHHYKKPGYNG |
| | | after F468 amino acid | SCFNVEIKRNDDLSWLWNESTALYPSIYL |
| | | residue at C-terminus | NTQQSPVAATLYVRNRVREAIRVSKIPDA |
| | | of PH20. | KSPLPVFAYTRIVFTDQVLKFLSQDELVY |
| | | | TFGETVALGASGIVIWGSWVNTRTKESCQ |
| | | | AIKEYMDTTLNPYIINVTLAAKMCSQVLC |
| | | | QEQGVCIRKNWNSSDYLHLNPDNFAIQLE |
| | | | KGGKFTVRGKPTLEDLEQFSEKFYCSCYS |
| | | | TLSCKEKADVKDTDAVDVCIADGVCIDA |
| | | | F |
| HM72 | 174 | One amino acid residue | FRAPPVIPNVPFLWAWNAPSEFCLGKFDE |
| | | N344F is substituted | PLDMSLFSFIGSPRINATGQGVTIFYVDRL |
| | | from SEQ ID NO: 3, | GYYPYIDSITGVTVNGGIPQKISLQDHLDK |
| | | cleavage occurs before | AKKDITFYMPVDNLGMAVIDWEEWRPT |
| | | F38 amino acid residue | WARNWKPKDVYKNRSIELVQQQNVQLS |
| | | at N-terminus of PH20, | LTEATEKAKQEFEKAGKDFLVETIKLGKL |
| | | and cleavage occurs | LRPNHLWGYYLFPDCYNHHYKKPGYNG |
| | | after F468 amino acid | SCFNVEIKRNDDLSWLWNESTALYPSIYL |
| | | residue at C-terminus | NTQQSPVAATLYVRNRVREAIRVSKIPDA |
| | | of PH20. | KSPLPVFAYTRIVFTDQVLKFLSQDELVY |
| | | | TFGETVALGASGIVIWGSWEFTRTKESCQ |
| | | | AIKEYMDTTLNPYIINVTLAAKMCSQVLC |
| | | | QEQGVCIRKNWNSSDYLHLNPDNFAIQLE |
| | | | KGGKFTVRGKPTLEDLEQFSEKFYCSCYS |
| | | | TLSCKEKADVKDTDAVDVCIADGVCIDA |
| | | | F |
| HM73 | 175 | One amino acid residue | FRAPPVIPNVPFLWAWNAPSEFCLGKFDE |
| | | D359K is substituted | PLDMSLFSFIGSPRINATGQGVTIFYVDRL |
| | | from SEQ ID NO: 3, | GYYPYIDSITGVTVNGGIPQKISLQDHLDK |
| | | cleavage occurs before | AKKDITFYMPVDNLGMAVIDWEEWRPT |
| | | F38 amino acid residue | WARNWKPKDVYKNRSIELVQQQNVQLS |
| | | at N-terminus of PH20, | LTEATEKAKQEFEKAGKDFLVETIKLGKL |
| | | and cleavage occurs | LRPNHLWGYYLFPDCYNHHYKKPGYNG |
| | | after F468 amino acid | SCFNVEIKRNDDLSWLWNESTALYPSIYL |
| | | residue at C-terminus | NTQQSPVAATLYVRNRVREAIRVSKIPDA |
| | | of PH20. | KSPLPVFAYTRIVFTDQVLKFLSQDELVY |
| | | | TFGETVALGASGIVIWGSWENTRTKESCQ |
| | | | AIKEYMKTTLNPYIINVTLAAKMCSQVLC |
| | | | QEQGVCIRKNWNSSDYLHLNPDNFAIQLE |
| | | | KGGKFTVRGKPTLEDLEQFSEKFYCSCYS |
| | | | TLSCKEKADVKDTDAVDVCIADGVCIDA |
| | | | F |
| HM74 | 176 | One amino acid residue | FRAPPVIPNVPFLWAWNAPSEFCLGKFDE |
| | | T360Y is substituted | PLDMSLFSFIGSPRINATGQGVTIFYVDRL |
| | | from SEQ ID NO: 3, | GYYPYIDSITGVTVNGGIPQKISLQDHLDK |
| | | cleavage occurs before | AKKDITFYMPVDNLGMAVIDWEEWRPT |
| | | F38 amino acid residue | WARNWKPKDVYKNRSIELVQQQNVQLS |
| | | at N-terminus of PH20, | LTEATEKAKQEFEKAGKDFLVETIKLGKL |
| | | and cleavage occurs | LRPNHLWGYYLFPDCYNHHYKKPGYNG |
| | | after F468 amino acid | SCFNVEIKRNDDLSWLWNESTALYPSIYL |
| | | residue at C-terminus | NTQQSPVAATLYVRNRVREAIRVSKIPDA |
| | | of PH20. | KSPLPVFAYTRIVFTDQVLKFLSQDELVY |
| | | | TFGETVALGASGIVIWGSWENTRTKESCQ |
| | | | AIKEYMDYTLNPYIINVTLAAKMCSQVLC |
| | | | QEQGVCIRKNWNSSDYLHLNPDNFAIQLE |
| | | | KGGKFTVRGKPTLEDLEQFSEKFYCSCYS |
| | | | TLSCKEKADVKDTDAVDVCIADGVCIDA |
| | | | F |
| HM75 | 177 | One amino acid residue | FRAPPVIPNVPFLWAWNAPSEFCLGKFDE |
| | | T361M is substituted | PLDMSLFSFIGSPRINATGQGVTIFYVDRL |
| | | from SEQ ID NO: 3, | GYYPYIDSITGVTVNGGIPQKISLQDHLDK |
| | | cleavage occurs before | AKKDITFYMPVDNLGMAVIDWEEWRPT |
| | | F38 amino acid residue | WARNWKPKDVYKNRSIELVQQQNVQLS |
| | | at N-terminus of PH20, | LTEATEKAKQEFEKAGKDFLVETIKLGKL |
| | | and cleavage occurs | LRPNHLWGYYLFPDCYNHHYKKPGYNG |
| | | after F468 amino acid | SCFNVEIKRNDDLSWLWNESTALYPSIYL |
| | | residue at C-terminus | NTQQSPVAATLYVRNRVREAIRVSKIPDA |
| | | of PH20. | KSPLPVFAYTRIVFTDQVLKFLSQDELVY |
| | | | TFGETVALGASGIVIWGSWENTRTKESCQ |
| | | | AIKEYMDTMLNPYIINVTLAAKMCSQVL |
| | | | CQEQGVCIRKNWNSSDYLHLNPDNFAIQ |
| | | | LEKGGKFTVRGKPTLEDLEQFSEKFYCSC |
| | | | YSTLSCKEKADVKDTDAVDVCIADGVCI |
| | | | DAF |
| HM76 | 178 | One amino acid residue | FRAPPVIPNVPFLWAWNAPSEFCLGKFDE |
| | | Q352E is substituted | PLDMSLFSFIGSPRINATGQGVTIFYVDRL |
| | | from SEQ ID NO: 3, | GYYPYIDSITGVTVNGGIPQKISLQDHLDK |
| | | cleavage occurs before | AKKDITFYMPVDNLGMAVIDWEEWRPT |
| | | F38 amino acid residue | WARNWKPKDVYKNRSIELVQQQNVQLS |
| | | at N-terminus of PH20, | LTEATEKAKQEFEKAGKDFLVETIKLGKL |
| | | and cleavage occurs | LRPNHLWGYYLFPDCYNHHYKKPGYNG |
| | | after F468 amino acid | SCFNVEIKRNDDLSWLWNESTALYPSIYL |
| | | residue at C-terminus | NTQQSPVAATLYVRNRVREAIRVSKIPDA |
| | | of PH20. | KSPLPVFAYTRIVFTDQVLKFLSQDELVY |
| | | | TFGETVALGASGIVIWGSWENTRTKESCE |
| | | | AIKEYMDTTLNPYIINVTLAAKMCSQVLC |
| | | | QEQGVCIRKNWNSSDYLHLNPDNFAIQLE |
| | | | KGGKFTVRGKPTLEDLEQFSEKFYCSCYS |
| | | | TLSCKEKADVKDTDAVDVCIADGVCIDA |
| | | | F |
| HM77 | 179 | One amino acid residue | FRAPPVIPNVPFLWAWNAPSEFCLGKFDE |
| | | N363M is substituted | PLDMSLFSFIGSPRINATGQGVTIFYVDRL |
| | | from SEQ ID NO: 3, | GYYPYIDSITGVTVNGGIPQKISLQDHLDK |
| | | cleavage occurs before | AKKDITFYMPVDNLGMAVIDWEEWRPT |
| | | F38 amino acid residue | WARNWKPKDVYKNRSIELVQQQNVQLS |
| | | at N-terminus of PH20, | LTEATEKAKQEFEKAGKDFLVETIKLGKL |
| | | and cleavage occurs | LRPNHLWGYYLFPDCYNHHYKKPGYNG |
| | | after F468 amino acid | SCFNVEIKRNDDLSWLWNESTALYPSIYL |
| | | residue at C-terminus | NTQQSPVAATLYVRNRVREAIRVSKIPDA |
| | | of PH20. | KSPLPVFAYTRIVFTDQVLKFLSQDELVY |
| | | | TFGETVALGASGIVIWGSWENTRTKESCQ |
| | | | AIKEYMDTTLMPYIINVTLAAKMCSQVL |
| | | | CQEQGVCIRKNWNSSDYLHLNPDNFAIQ |
| | | | LEKGGKFTVRGKPTLEDLEQFSEKFYCSC |
| | | | YSTLSCKEKADVKDTDAVDVCIADGVCI |
| | | | DAF |
| HM78 | 180 | One amino acid residue | FRAPPVIPNVPFLWAWNAPSEFCLGKFDE |
| | | T84N is substituted | PLDMSLFSFIGSPRINANGQGVTIFYVDRL |
| | | from SEQ ID NO: 3, | GYYPYIDSITGVTVNGGIPQKISLQDHLDK |
| | | residue cleavage occurs | AKKDITFYMPVDNLGMAVIDWEEWRPT |
| | | before F38 amino acid | WARNWKPKDVYKNRSIELVQQQNVQLS |
| | | at N-terminus of PH20, | LTEATEKAKQEFEKAGKDFLVETIKLGKL |
| | | and cleavage occurs | LRPNHLWGYYLFPDCYNHHYKKPGYNG |
| | | after F468 amino acid | SCFNVEIKRNDDLSWLWNESTALYPSIYL |
| | | residue at C-terminus | NTQQSPVAATLYVRNRVREAIRVSKIPDA |
| | | of PH20. | KSPLPVFAYTRIVFTDQVLKFLSQDELVY |
| | | | TFGETVALGASGIVIWGSWENTRTKESCQ |
| | | | AIKEYMDTTLNPYIINVTLAAKMCSQVLC |
| | | | QEQGVCIRKNWNSSDYLHLNPDNFAIQLE |
| | | | KGGKFTVRGKPTLEDLEQFSEKFYCSCYS |
| | | | TLSCKEKADVKDTDAVDVCIADGVCIDA |
| | | | F |
| HM79 | 181 | One amino acid residue | FRAPPVIPNVPFLWAWNAPSEFCLGKFDE |
| | | N166K is substituted | PLDMSLFSFIGSPRINATGQGVTIFYVDRL |
| | | from SEQ ID NO: 3, | GYYPYIDSITGVTVNGGIPQKISLQDHLDK |
| | | cleavage occurs before | AKKDITFYMPVDNLGMAVIDWEEWRPT |
| | | F38 amino acid residue | WARNWKPKDVYKKRSIELVQQQNVQLS |
| | | at N-terminus of PH20, | LTEATEKAKQEFEKAGKDFLVETIKLGKL |
| | | and cleavage occurs | LRPNHLWGYYLFPDCYNHHYKKPGYNG |
| | | after F468 amino acid | SCFNVEIKRNDDLSWLWNESTALYPSIYL |
| | | residue at C-terminus | NTQQSPVAATLYVRNRVREAIRVSKIPDA |
| | | of PH20. | KSPLPVFAYTRIVFTDQVLKFLSQDELVY |
| | | | TFGETVALGASGIVIWGSWENTRTKESCQ |
| | | | AIKEYMDTTLNPYIINVTLAAKMCSQVLC |
| | | | QEQGVCIRKNWNSSDYLHLNPDNFAIQLE |
| | | | KGGKFTVRGKPTLEDLEQFSEKFYCSCYS |
| | | | TLSCKEKADVKDTDAVDVCIADGVCIDA |
| | | | F |
| HM82 | 182 | One amino acid residue | FRAPPVIPNVPFLWAWNAPSEFCLGKFDE |
| | | I354E is substituted | PLDMSLFSFIGSPRINATGQGVTIFYVDRL |
| | | from SEQ ID NO: 3, | GYYPYIDSITGVTVNGGIPQKISLQDHLDK |
| | | residue cleavage occurs | AKKDITFYMPVDNLGMAVIDWEEWRPT |
| | | before F38 amino acid | WARNWKPKDVYKNRSIELVQQQNVQLS |
| | | at N-terminus of PH20, | LTEATEKAKQEFEKAGKDFLVETIKLGKL |
| | | and cleavage occurs | LRPNHLWGYYLFPDCYNHHYKKPGYNG |
| | | after F468 amino acid | SCFNVEIKRNDDLSWLWNESTALYPSIYL |
| | | residue at C-terminus | NTQQSPVAATLYVRNRVREAIRVSKIPDA |
| | | of PH20. | KSPLPVFAYTRIVFTDQVLKFLSQDELVY |
| | | | TFGETVALGASGIVIWGSWENTRTKESCQ |
| | | | AEKEYMDTTLNPYIINVTLAAKMCSQVL |
| | | | CQEQGVCIRKNWNSSDYLHLNPDNFAIQ |
| | | | LEKGGKFTVRGKPTLEDLEQFSEKFYCSC |
| | | | YSTLSCKEKADVKDTDAVDVCIADGVCI |
| | | | DAF |
| HM83 | 183 | One amino acid residue | FRAPPVIPNVPFLWAWNAPSEFCLGKFDE |
| | | I354Q is substituted | PLDMSLFSFIGSPRINATGQGVTIFYVDRL |
| | | from SEQ ID NO: 3, | GYYPYIDSITGVTVNGGIPQKISLQDHLDK |
| | | cleavage occurs before | AKKDITFYMPVDNLGMAVIDWEEWRPT |
| | | F38 amino acid residue | WARNWKPKDVYKNRSIELVQQQNVQLS |
| | | at N-terminus of PH20, | LTEATEKAKQEFEKAGKDFLVETIKLGKL |
| | | and cleavage occurs | LRPNHLWGYYLFPDCYNHHYKKPGYNG |
| | | after F468 amino acid | SCFNVEIKRNDDLSWLWNESTALYPSIYL |
| | | residue at C-terminus | NTQQSPVAATLYVRNRVREAIRVSKIPDA |
| | | of PH20. | KSPLPVFAYTRIVFTDQVLKFLSQDELVY |
| | | | TFGETVALGASGIVIWGSWENTRTKESCQ |
| | | | AQKEYMDTTLNPYIINVTLAAKMCSQVL |
| | | | CQEQGVCIRKNWNSSDYLHLNPDNFAIQ |
| | | | LEKGGKFTVRGKPTLEDLEQFSEKFYCSC |
| | | | YSTLSCKEKADVKDTDAVDVCIADGVCI |
| | | | DAF |
| HM84 | 184 | One amino acid residue | FRAPPVIPNVPFLWAWNAPSEFCLGKFDE |
| | | I354S is substituted | PLDMSLFSFIGSPRINATGQGVTIFYVDRL |
| | | from SEQ ID NO: 3, | GYYPYIDSITGVTVNGGIPQKISLQDHLDK |
| | | cleavage occurs before | AKKDITFYMPVDNLGMAVIDWEEWRPT |
| | | F38 amino acid residue | WARNWKPKDVYKNRSIELVQQQNVQLS |
| | | at N-terminus of PH20, | LTEATEKAKQEFEKAGKDFLVETIKLGKL |
| | | and cleavage occurs | LRPNHLWGYYLFPDCYNHHYKKPGYNG |
| | | after F468 amino acid | SCFNVEIKRNDDLSWLWNESTALYPSIYL |
| | | residue at C-terminus | NTQQSPVAATLYVRNRVREAIRVSKIPDA |
| | | of PH20. | KSPLPVFAYTRIVFTDQVLKFLSQDELVY |
| | | | TFGETVALGASGIVIWGSWENTRTKESCQ |
| | | | ASKEYMDTTLNPYIINVTLAAKMCSQVL |
| | | | CQEQGVCIRKNWNSSDYLHLNPDNFAIQ |
| | | | LEKGGKFTVRGKPTLEDLEQFSEKFYCSC |
| | | | YSTLSCKEKADVKDTDAVDVCIADGVCI |
| | | | DAF |
| HM85 | 185 | One amino acid residue | FRAPPVIPNVPFLWAWNAPSEFCLGKFDE |
| | | I354V is substituted | PLDMSLFSFIGSPRINATGQGVTIFYVDRL |
| | | from SEQ ID NO: 3, | GYYPYIDSITGVTVNGGIPQKISLQDHLDK |
| | | cleavage occurs before | AKKDITFYMPVDNLGMAVIDWEEWRPT |
| | | F38 amino acid residue | WARNWKPKDVYKNRSIELVQQQNVQLS |
| | | at N-terminus of PH20, | LTEATEKAKQEFEKAGKDFLVETIKLGKL |
| | | and cleavage occurs | LRPNHLWGYYLFPDCYNHHYKKPGYNG |
| | | after F468 amino acid | SCFNVEIKRNDDLSWLWNESTALYPSIYL |
| | | residue at C-terminus | NTQQSPVAATLYVRNRVREAIRVSKIPDA |
| | | of PH20. | KSPLPVFAYTRIVFTDQVLKFLSQDELVY |
| | | | TFGETVALGASGIVIWGSWENTRTKESCQ |
| | | | AVKEYMDTTLNPYIINVTLAAKMCSQVL |
| | | | CQEQGVCIRKNWNSSDYLHLNPDNFAIQ |
| | | | LEKGGKFTVRGKPTLEDLEQFSEKFYCSC |
| | | | YSTLSCKEKADVKDTDAVDVCIADGVCI |
| | | | DAF |
| HM86 | 186 | One amino acid residue | FRAPPVIPNVPFLWAWNAPSEFCLGKFDE |
| | | I354A is substituted | PLDMSLFSFIGSPRINATGQGVTIFYVDRL |
| | | from SEQ ID NO: 3, | GYYPYIDSITGVTVNGGIPQKISLQDHLDK |
| | | cleavage occurs before | AKKDITFYMPVDNLGMAVIDWEEWRPT |
| | | F38 amino acid residue | WARNWKPKDVYKNRSIELVQQQNVQLS |
| | | at N-terminus of PH20, | LTEATEKAKQEFEKAGKDFLVETIKLGKL |
| | | and cleavage occurs | LRPNHLWGYYLFPDCYNHHYKKPGYNG |
| | | after F468 amino acid | SCFNVEIKRNDDLSWLWNESTALYPSIYL |
| | | residue at C-terminus | NTQQSPVAATLYVRNRVREAIRVSKIPDA |
| | | of PH20. | KSPLPVFAYTRIVFTDQVLKFLSQDELVY |
| | | | TFGETVALGASGIVIWGSWENTRTKESCQ |
| | | | AAKEYMDTTLNPYIINVTLAAKMCSQVL |
| | | | CQEQGVCIRKNWNSSDYLHLNPDNFAIQ |
| | | | LEKGGKFTVRGKPTLEDLEQFSEKFYCSC |
| | | | YSTLSCKEKADVKDTDAVDVCIADGVCI |
| | | | DAF |
| HM88 | 187 | One amino acid residue | FRAPPVIPNVPFLWAWNAPSEFCLGKFDE |
| | | I354N is substituted | PLDMSLFSFIGSPRINATGQGVTIFYVDRL |
| | | from SEQ ID NO: 3, | GYYPYIDSITGVTVNGGIPQKISLQDHLDK |
| | | cleavage occurs before | AKKDITFYMPVDNLGMAVIDWEEWRPT |
| | | F38 amino acid residue | WARNWKPKDVYKNRSIELVQQQNVQLS |
| | | at N-terminus of PH20, | LTEATEKAKQEFEKAGKDFLVETIKLGKL |
| | | and cleavage occurs | LRPNHLWGYYLFPDCYNHHYKKPGYNG |
| | | after F468 amino acid | SCFNVEIKRNDDLSWLWNESTALYPSIYL |
| | | residue at C-terminus | NTQQSPVAATLYVRNRVREAIRVSKIPDA |
| | | of PH20. | KSPLPVFAYTRIVFTDQVLKFLSQDELVY |
| | | | TFGETVALGASGIVIWGSWENTRTKESCQ |
| | | | ANKEYMDTTLNPYIINVTLAAKMCSQVL |
| | | | CQEQGVCIRKNWNSSDYLHLNPDNFAIQ |
| | | | LEKGGKFTVRGKPTLEDLEQFSEKFYCSC |
| | | | YSTLSCKEKADVKDTDAVDVCIADGVCI |
| | | | DAF |
| HM89 | 188 | One amino acid residue | FRAPPVIPNVPFLWAWNAPSEFCLGKFDE |
| | | I354T is substituted | PLDMSLFSFIGSPRINATGQGVTIFYVDRL |
| | | from SEQ ID NO: 3, | GYYPYIDSITGVTVNGGIPQKISLQDHLDK |
| | | cleavage occurs before | AKKDITFYMPVDNLGMAVIDWEEWRPT |
| | | F38 amino acid residue | WARNWKPKDVYKNRSIELVQQQNVQLS |
| | | at N-terminus of PH20, | LTEATEKAKQEFEKAGKDFLVETIKLGKL |
| | | and cleavage occurs | LRPNHLWGYYLFPDCYNHHYKKPGYNG |
| | | after F468 amino acid | SCFNVEIKRNDDLSWLWNESTALYPSIYL |
| | | residue at C-terminus | NTQQSPVAATLYVRNRVREAIRVSKIPDA |
| | | of PH20. | KSPLPVFAYTRIVFTDQVLKFLSQDELVY |
| | | | TFGETVALGASGIVIWGSWENTRTKESCQ |
| | | | ATKEYMDTTLNPYIINVTLAAKMCSQVL |
| | | | CQEQGVCIRKNWNSSDYLHLNPDNFAIQ |
| | | | LEKGGKFTVRGKPTLEDLEQFSEKFYCSC |
| | | | YSTLSCKEKADVKDTDAVDVCIADGVCI |
| | | | DAF |
| HM90 | 189 | One amino acid residue | FRAPPVIPNVPFLWAWNAPSEFCLGKFDE |
| | | E356M is substituted | PLDMSLFSFIGSPRINATGQGVTIFYVDRL |
| | | from SEQ ID NO: 3, | GYYPYIDSITGVTVNGGIPQKISLQDHLDK |
| | | cleavage occurs before | AKKDITFYMPVDNLGMAVIDWEEWRPT |
| | | F38 amino acid residue | WARNWKPKDVYKNRSIELVQQQNVQLS |
| | | at N-terminus of PH20, | LTEATEKAKQEFEKAGKDFLVETIKLGKL |
| | | and cleavage occurs | LRPNHLWGYYLFPDCYNHHYKKPGYNG |
| | | after F468 amino acid | SCFNVEIKRNDDLSWLWNESTALYPSIYL |
| | | residue at C-terminus | NTQQSPVAATLYVRNRVREAIRVSKIPDA |
| | | of PH20. | KSPLPVFAYTRIVFTDQVLKFLSQDELVY |
| | | | TFGETVALGASGIVIWGSWENTRTKESCQ |
| | | | AIKMYMDTTLNPYIINVTLAAKMCSQVL |
| | | | CQEQGVCIRKNWNSSDYLHLNPDNFAIQ |
| | | | LEKGGKFTVRGKPTLEDLEQFSEKFYCSC |
| | | | YSTLSCKEKADVKDTDAVDVCIADGVCI |
| | | | DAF |
| HM91 | 190 | One amino acid residue | FRAPPVIPNVPFLWAWNAPSEFCLGKFDE |
| | | E356F is substituted | PLDMSLFSFIGSPRINATGQGVTIFYVDRL |
| | | from SEQ ID NO: 3, | GYYPYIDSITGVTVNGGIPQKISLQDHLDK |
| | | cleavage occurs before | AKKDITFYMPVDNLGMAVIDWEEWRPT |
| | | F38 amino acid residue | WARNWKPKDVYKNRSIELVQQQNVQLS |
| | | at N-terminus of PH20, | LTEATEKAKQEFEKAGKDFLVETIKLGKL |
| | | and cleavage occurs | LRPNHLWGYYLFPDCYNHHYKKPGYNG |
| | | after F468 amino acid | SCFNVEIKRNDDLSWLWNESTALYPSIYL |
| | | residue at C-terminus | NTQQSPVAATLYVRNRVREAIRVSKIPDA |
| | | of PH20. | KSPLPVFAYTRIVFTDQVLKFLSQDELVY |
| | | | TFGETVALGASGIVIWGSWENTRTKESCQ |
| | | | AIKFYMDTTLNPYIINVTLAAKMCSQVLC |
| | | | QEQGVCIRKNWNSSDYLHLNPDNFAIQLE |
| | | | KGGKFTVRGKPTLEDLEQFSEKFYCSCYS |
| | | | TLSCKEKADVKDTDAVDVCIADGVCIDA |
| | | | F |
| HM92 | 191 | One amino acid residue | FRAPPVIPNVPFLWAWNAPSEFCLGKFDE |
| | | E356I is substituted | PLDMSLFSFIGSPRINATGQGVTIFYVDRL |
| | | from SEQ ID NO: 3, | GYYPYIDSITGVTVNGGIPQKISLQDHLDK |
| | | cleavage occurs before | AKKDITFYMPVDNLGMAVIDWEEWRPT |
| | | F38 amino acid residue | WARNWKPKDVYKNRSIELVQQQNVQLS |
| | | at N-terminus of PH20, | LTEATEKAKQEFEKAGKDFLVETIKLGKL |
| | | and cleavage occurs | LRPNHLWGYYLFPDCYNHHYKKPGYNG |
| | | after F468 amino acid | SCFNVEIKRNDDLSWLWNESTALYPSIYL |
| | | residue at C-terminus | NTQQSPVAATLYVRNRVREAIRVSKIPDA |
| | | of PH20. | KSPLPVFAYTRIVFTDQVLKFLSQDELVY |
| | | | TFGETVALGASGIVIWGSWENTRTKESCQ |
| | | | AIKIYMDTTLNPYIINVTLAAKMCSQVLC |
| | | | QEQGVCIRKNWNSSDYLHLNPDNFAIQLE |
| | | | KGGKFTVRGKPTLEDLEQFSEKFYCSCYS |
| | | | TLSCKEKADVKDTDAVDVCIADGVCIDA |
| | | | F |
| HM93 | 192 | One amino acid residue | FRAPPVIPNVPFLWAWNAPSEFCLGKFDE |
| | | E356L is substituted | PLDMSLFSFIGSPRINATGQGVTIFYVDRL |
| | | from SEQ ID NO: 3, | GYYPYIDSITGVTVNGGIPQKISLQDHLDK |
| | | cleavage occurs before | AKKDITFYMPVDNLGMAVIDWEEWRPT |
| | | F38 amino acid residue | WARNWKPKDVYKNRSIELVQQQNVQLS |
| | | at N-terminus of PH20, | LTEATEKAKQEFEKAGKDFLVETIKLGKL |
| | | and cleavage occurs | LRPNHLWGYYLFPDCYNHHYKKPGYNG |
| | | after F468 amino acid | SCFNVEIKRNDDLSWLWNESTALYPSIYL |
| | | residue at C-terminus | NTQQSPVAATLYVRNRVREAIRVSKIPDA |
| | | of PH20. | KSPLPVFAYTRIVFTDQVLKFLSQDELVY |
| | | | TFGETVALGASGIVIWGSWENTRTKESCQ |
| | | | AIKLYMDTTLNPYIINVTLAAKMCSQVLC |
| | | | QEQGVCIRKNWNSSDYLHLNPDNFAIQLE |
| | | | KGGKFTVRGKPTLEDLEQFSEKFYCSCYS |
| | | | TLSCKEKADVKDTDAVDVCIADGVCIDA |
| | | | F |
| HM94 | 193 | One amino acid residue | FRAPPVIPNVPFLWAWNAPSEFCLGKFDE |
| | | E356Q is substituted | PLDMSLFSFIGSPRINATGQGVTIFYVDRL |
| | | from SEQ ID NO: 3, | GYYPYIDSITGVTVNGGIPQKISLQDHLDK |
| | | cleavage occurs before | AKKDITFYMPVDNLGMAVIDWEEWRPT |
| | | F38 amino acid residue | WARNWKPKDVYKNRSIELVQQQNVQLS |
| | | at N-terminus of PH20, | LTEATEKAKQEFEKAGKDFLVETIKLGKL |
| | | and cleavage occurs | LRPNHLWGYYLFPDCYNHHYKKPGYNG |
| | | after F468 amino acid | SCFNVEIKRNDDLSWLWNESTALYPSIYL |
| | | residue at C-terminus | NTQQSPVAATLYVRNRVREAIRVSKIPDA |
| | | of PH20. | KSPLPVFAYTRIVFTDQVLKFLSQDELVY |
| | | | TFGETVALGASGIVIWGSWENTRTKESCQ |
| | | | AIKQYMDTTLNPYIINVTLAAKMCSQVLC |
| | | | QEQGVCIRKNWNSSDYLHLNPDNFAIQLE |
| | | | KGGKFTVRGKPTLEDLEQFSEKFYCSCYS |
| | | | TLSCKEKADVKDTDAVDVCIADGVCIDA |
| | | | F |
| HM95 | 194 | One amino acid residue | FRAPPVIPNVPFLWAWNAPSEFCLGKFDE |
| | | E356V is substituted | PLDMSLFSFIGSPRINATGQGVTIFYVDRL |
| | | from SEQ ID NO: 3, | GYYPYIDSITGVTVNGGIPQKISLQDHLDK |
| | | cleavage occurs before | AKKDITFYMPVDNLGMAVIDWEEWRPT |
| | | F38 amino acid residue | WARNWKPKDVYKNRSIELVQQQNVQLS |
| | | at N-terminus of PH20, | LTEATEKAKQEFEKAGKDFLVETIKLGKL |
| | | and cleavage occurs | LRPNHLWGYYLFPDCYNHHYKKPGYNG |
| | | after F468 amino acid | SCFNVEIKRNDDLSWLWNESTALYPSIYL |
| | | residue at C-terminus | NTQQSPVAATLYVRNRVREAIRVSKIPDA |
| | | of PH20. | KSPLPVFAYTRIVFTDQVLKFLSQDELVY |
| | | | TFGETVALGASGIVIWGSWENTRTKESCQ |
| | | | AIKVYMDTTLNPYIINVTLAAKMCSQVLC |
| | | | QEQGVCIRKNWNSSDYLHLNPDNFAIQLE |
| | | | KGGKFTVRGKPTLEDLEQFSEKFYCSCYS |
| | | | TLSCKEKADVKDTDAVDVCIADGVCIDA |
| | | | F |
| HM96 | 195 | 3 amino acid residues | FRAPPVIPNVPFLWAWNAPSEFCLGKFDE |
| | | N166K, E343V and | PLDMSLFSFIGSPRINATGQGVTIFYVDRL |
| | | T361M are substituted | GYYPYIDSITGVTVNGGIPQKISLQDHLDK |
| | | from SEQ ID NO: 3, | AKKDITFYMPVDNLGMAVIDWEEWRPT |
| | | cleavage occurs before | WARNWKPKDVYKKRSIELVQQQNVQLS |
| | | F38 amino acid residue | LTEATEKAKQEFEKAGKDFLVETIKLGKL |
| | | at N-terminus of PH20, | LRPNHLWGYYLFPDCYNHHYKKPGYNG |
| | | and cleavage occurs | SCFNVEIKRNDDLSWLWNESTALYPSIYL |
| | | after F468 amino acid | NTQQSPVAATLYVRNRVREAIRVSKIPDA |
| | | residue at C-terminus | KSPLPVFAYTRIVFTDQVLKFLSQDELVY |
| | | of PH20. | TFGETVALGASGIVIWGSWVNTRTKESCQ |
| | | | AIKEYMDTMLNPYIINVTLAAKMCSQVL |
| | | | CQEQGVCIRKNWNSSDYLHLNPDNFAIQ |
| | | | LEKGGKFTVRGKPTLEDLEQFSEKFYCSC |
| | | | YSTLSCKEKADVKDTDAVDVCIADGVCI |
| | | | DAF |
| HM97 | 196 | One amino acid residue | FRAPPVIPNVPFLWAWNAPSEFCLGKFDE |
| | | G340Q is substituted | PLDMSLFSFIGSPRINATGQGVTIFYVDRL |
| | | from SEQ ID NO: 3, | GYYPYIDSITGVTVNGGIPQKISLQDHLDK |
| | | cleavage occurs before | AKKDITFYMPVDNLGMAVIDWEEWRPT |
| | | F38 amino acid residue | WARNWKPKDVYKNRSIELVQQQNVQLS |
| | | at N-terminus of PH20, | LTEATEKAKQEFEKAGKDFLVETIKLGKL |
| | | and cleavage occurs | LRPNHLWGYYLFPDCYNHHYKKPGYNG |
| | | after F468 amino acid | SCFNVEIKRNDDLSWLWNESTALYPSIYL |
| | | residue at C-terminus | NTQQSPVAATLYVRNRVREAIRVSKIPDA |
| | | of PH20. | KSPLPVFAYTRIVFTDQVLKFLSQDELVY |
| | | | TFGETVALGASGIVIWQSWENTRTKESCQ |
| | | | AIKEYMDTTLNPYIINVTLAAKMCSQVLC |
| | | | QEQGVCIRKNWNSSDYLHLNPDNFAIQLE |
| | | | KGGKFTVRGKPTLEDLEQFSEKFYCSCYS |
| | | | TLSCKEKADVKDTDAVDVCIADGVCIDA |
| | | | F |
| HM98 | 197 | One amino acid residue | FRAPPVIPNVPFLWAWNAPSEFCLGKFDE |
| | | S341H is substituted | PLDMSLFSFIGSPRINATGQGVTIFYVDRL |
| | | from SEQ ID NO: 3, | GYYPYIDSITGVTVNGGIPQKISLQDHLDK |
| | | cleavage occurs before | AKKDITFYMPVDNLGMAVIDWEEWRPT |
| | | F38 amino acid residue | WARNWKPKDVYKNRSIELVQQQNVQLS |
| | | at N-terminus of PH20, | LTEATEKAKQEFEKAGKDFLVETIKLGKL |
| | | and cleavage occurs | LRPNHLWGYYLFPDCYNHHYKKPGYNG |
| | | after F468 amino acid | SCFNVEIKRNDDLSWLWNESTALYPSIYL |
| | | residue at C-terminus | NTQQSPVAATLYVRNRVREAIRVSKIPDA |
| | | of PH20. | KSPLPVFAYTRIVFTDQVLKFLSQDELVY |
| | | | TFGETVALGASGIVIWGHWENTRTKESC |
| | | | QAIKEYMDTTLNPYIINVTLAAKMCSQVL |
| | | | CQEQGVCIRKNWNSSDYLHLNPDNFAIQ |
| | | | LEKGGKFTVRGKPTLEDLEQFSEKFYCSC |
| | | | YSTLSCKEKADVKDTDAVDVCIADGVCI |
| | | | DAF |
| HM99 | 198 | One amino acid residue | FRAPPVIPNVPFLWAWNAPSEFCLGKFDE |
| | | W342I is substituted | PLDMSLFSFIGSPRINATGQGVTIFYVDRL |
| | | from SEQ ID NO: 3, | GYYPYIDSITGVTVNGGIPQKISLQDHLDK |
| | | cleavage occurs before | AKKDITFYMPVDNLGMAVIDWEEWRPT |
| | | F38 amino acid residue | WARNWKPKDVYKNRSIELVQQQNVQLS |
| | | at N-terminus of PH20, | LTEATEKAKQEFEKAGKDFLVETIKLGKL |
| | | and cleavage occurs | LRPNHLWGYYLFPDCYNHHYKKPGYNG |
| | | after F468 amino acid | SCFNVEIKRNDDLSWLWNESTALYPSIYL |
| | | residue at C-terminus | NTQQSPVAATLYVRNRVREAIRVSKIPDA |
| | | of PH20. | KSPLPVFAYTRIVFTDQVLKFLSQDELVY |
| | | | TFGETVALGASGIVIWGSIENTRTKESCQ |
| | | | AIKEYMDTTLNPYIINVTLAAKMCSQVLC |
| | | | QEQGVCIRKNWNSSDYLHLNPDNFAIQLE |
| | | | KGGKFTVRGKPTLEDLEQFSEKFYCSCYS |
| | | | TLSCKEKADVKDTDAVDVCIADGVCIDA |
| | | | F |
| HM100 | 199 | One amino acid residue | FRAPPVIPNVPFLWAWNAPSEFCLGKFDE |
| | | E343Y is substituted | PLDMSLFSFIGSPRINATGQGVTIFYVDRL |
| | | from SEQ ID NO: 3, | GYYPYIDSITGVTVNGGIPQKISLQDHLDK |
| | | cleavage occurs before | AKKDITFYMPVDNLGMAVIDWEEWRPT |
| | | F38 amino acid residue | WARNWKPKDVYKNRSIELVQQQNVQLS |
| | | at N-terminus of PH20, | LTEATEKAKQEFEKAGKDFLVETIKLGKL |
| | | and cleavage occurs | LRPNHLWGYYLFPDCYNHHYKKPGYNG |
| | | after F468 amino acid | SCFNVEIKRNDDLSWLWNESTALYPSIYL |
| | | residue at C-terminus | NTQQSPVAATLYVRNRVREAIRVSKIPDA |
| | | of PH20. | KSPLPVFAYTRIVFTDQVLKFLSQDELVY |
| | | | TFGETVALGASGIVIWGSWYNTRTKESCQ |
| | | | AIKEYMDTTLNPYIINVTLAAKMCSQVLC |
| | | | QEQGVCIRKNWNSSDYLHLNPDNFAIQLE |
| | | | KGGKFTVRGKPTLEDLEQFSEKFYCSCYS |
| | | | TLSCKEKADVKDTDAVDVCIADGVCIDA |
| | | | F |
| HM101 | 200 | One amino acid residue | FRAPPVIPNVPFLWAWNAPSEFCLGKFDE |
| | | T345E is substituted | PLDMSLFSFIGSPRINATGQGVTIFYVDRL |
| | | from SEQ ID NO: 3, | GYYPYIDSITGVTVNGGIPQKISLQDHLDK |
| | | cleavage occurs before | AKKDITFYMPVDNLGMAVIDWEEWRPT |
| | | F38 amino acid residue | WARNWKPKDVYKNRSIELVQQQNVQLS |
| | | at N-terminus of PH20, | LTEATEKAKQEFEKAGKDFLVETIKLGKL |
| | | and cleavage occurs | LRPNHLWGYYLFPDCYNHHYKKPGYNG |
| | | after F468 amino acid | SCFNVEIKRNDDLSWLWNESTALYPSIYL |
| | | residue at C-terminus | NTQQSPVAATLYVRNRVREAIRVSKIPDA |
| | | of PH20. | KSPLPVFAYTRIVFTDQVLKFLSQDELVY |
| | | | TFGETVALGASGIVIWGSWENERTKESCQ |
| | | | AIKEYMDTTLNPYIINVTLAAKMCSQVLC |
| | | | QEQGVCIRKNWNSSDYLHLNPDNFAIQLE |
| | | | KGGKFTVRGKPTLEDLEQFSEKFYCSCYS |
| | | | TLSCKEKADVKDTDAVDVCIADGVCIDA |
| | | | F |
| HM102 | 201 | One amino acid residue | FRAPPVIPNVPFLWAWNAPSEFCLGKFDE |
| | | R346F is substituted | PLDMSLFSFIGSPRINATGQGVTIFYVDRL |
| | | from SEQ ID NO: 3, | GYYPYIDSITGVTVNGGIPQKISLQDHLDK |
| | | cleavage occurs before | AKKDITFYMPVDNLGMAVIDWEEWRPT |
| | | F38 amino acid residue | WARNWKPKDVYKNRSIELVQQQNVQLS |
| | | at N-terminus of PH20, | LTEATEKAKQEFEKAGKDFLVETIKLGKL |
| | | and cleavage occurs | LRPNHLWGYYLFPDCYNHHYKKPGYNG |
| | | after F468 amino acid | SCFNVEIKRNDDLSWLWNESTALYPSIYL |
| | | residue at C-terminus | NTQQSPVAATLYVRNRVREAIRVSKIPDA |
| | | of PH20. | KSPLPVFAYTRIVFTDQVLKFLSQDELVY |
| | | | TFGETVALGASGIVIWGSWENTFTKESCQ |
| | | | AIKEYMDTTLNPYIINVTLAAKMCSQVLC |
| | | | QEQGVCIRKNWNSSDYLHLNPDNFAIQLE |
| | | | KGGKFTVRGKPTLEDLEQFSEKFYCSCYS |
| | | | TLSCKEKADVKDTDAVDVCIADGVCIDA |
| | | | F |
| HM103 | 202 | One amino acid residue | FRAPPVIPNVPFLWAWNAPSEFCLGKFDE |
| | | T347E is substituted | PLDMSLFSFIGSPRINATGQGVTIFYVDRL |
| | | from SEQ ID NO: 3, | GYYPYIDSITGVTVNGGIPQKISLQDHLDK |
| | | cleavage occurs before | AKKDITFYMPVDNLGMAVIDWEEWRPT |
| | | F38 amino acid residue | WARNWKPKDVYKNRSIELVQQQNVQLS |
| | | at N-terminus of PH20, | LTEATEKAKQEFEKAGKDFLVETIKLGKL |
| | | and cleavage occurs | LRPNHLWGYYLFPDCYNHHYKKPGYNG |
| | | after F468 amino acid | SCFNVEIKRNDDLSWLWNESTALYPSIYL |
| | | residue at C-terminus | NTQQSPVAATLYVRNRVREAIRVSKIPDA |
| | | of PH20. | KSPLPVFAYTRIVFTDQVLKFLSQDELVY |
| | | | TFGETVALGASGIVIWGSWENTREKESCQ |
| | | | AIKEYMDTTLNPYIINVTLAAKMCSQVLC |
| | | | QEQGVCIRKNWNSSDYLHLNPDNFAIQLE |
| | | | KGGKFTVRGKPTLEDLEQFSEKFYCSCYS |
| | | | TLSCKEKADVKDTDAVDVCIADGVCIDA |
| | | | F |
| HM104 | 203 | One amino acid | FRAPPVIPNVPFLWAWNAPSEFCLGKFDE |
| | | residue E349L is | PLDMSLFSFIGSPRINATGQGVTIFYVDRL |
| | | substituted from SEQ | GYYPYIDSITGVTVNGGIPQKISLQDHLDK |
| | | ID NO: 3, cleavage | AKKDITFYMPVDNLGMAVIDWEEWRPT |
| | | occurs before F38 | WARNWKPKDVYKNRSIELVQQQNVQLS |
| | | amino acid residue at | LTEATEKAKQEFEKAGKDFLVETIKLGKL |
| | | N-terminus of PH20, | LRPNHLWGYYLFPDCYNHHYKKPGYNG |
| | | and cleavage occurs | SCFNVEIKRNDDLSWLWNESTALYPSIYL |
| | | after F468 amino acid | NTQQSPVAATLYVRNRVREAIRVSKIPDA |
| | | residue at C-terminus | KSPLPVFAYTRIVFTDQVLKFLSQDELVY |
| | | of PH20. | TFGETVALGASGIVIWGSWENTRTKLSCQ |
| | | | AIKEYMDTTLNPYIINVTLAAKMCSQVLC |
| | | | QEQGVCIRKNWNSSDYLHLNPDNFAIQLE |
| | | | KGGKFTVRGKPTLEDLEQFSEKFYCSCYS |
| | | | TLSCKEKADVKDTDAVDVCIADGVCIDA |
| | | | F |
| HM105 | 204 | One amino acid | FRAPPVIPNVPFLWAWNAPSEFCLGKFDE |
| | | residue S350I is | PLDMSLFSFIGSPRINATGQGVTIFYVDRL |
| | | substituted from SEQ | GYYPYIDSITGVTVNGGIPQKISLQDHLDK |
| | | ID NO: 3, cleavage | AKKDITFYMPVDNLGMAVIDWEEWRPT |
| | | occurs before F38 | WARNWKPKDVYKNRSIELVQQQNVQLS |
| | | amino acid residue at | LTEATEKAKQEFEKAGKDFLVETIKLGKL |
| | | N-terminus of PH20, | LRPNHLWGYYLFPDCYNHHYKKPGYNG |
| | | and cleavage occurs | SCFNVEIKRNDDLSWLWNESTALYPSIYL |
| | | after F468 amino acid | NTQQSPVAATLYVRNRVREAIRVSKIPDA |
| | | residue at C-terminus | KSPLPVFAYTRIVFTDQVLKFLSQDELVY |
| | | of PH20. | TFGETVALGASGIVIWGSWENTRTKEICQ |
| | | | AIKEYMDTTLNPYIINVTLAAKMCSQVLC |
| | | | QEQGVCIRKNWNSSDYLHLNPDNFAIQLE |
| | | | KGGKFTVRGKPTLEDLEQFSEKFYCSCYS |
| | | | TLSCKEKADVKDTDAVDVCIADGVCIDA |
| | | | F |
| HM106 | 205 | One amino acid residue | FRAPPVIPNVPFLWAWNAPSEFCLGKFDE |
| | | Q352G is substituted | PLDMSLFSFIGSPRINATGQGVTIFYVDRL |
| | | from SEQ ID NO: 3, | GYYPYIDSITGVTVNGGIPQKISLQDHLDK |
| | | cleavage occurs before | AKKDITFYMPVDNLGMAVIDWEEWRPT |
| | | F38 amino acid residue | WARNWKPKDVYKNRSIELVQQQNVQLS |
| | | at N-terminus of PH20, | LTEATEKAKQEFEKAGKDFLVETIKLGKL |
| | | and cleavage occurs | LRPNHLWGYYLFPDCYNHHYKKPGYNG |
| | | after F468 amino acid | SCFNVEIKRNDDLSWLWNESTALYPSIYL |
| | | residue at C-terminus | NTQQSPVAATLYVRNRVREAIRVSKIPDA |
| | | of PH20. | KSPLPVFAYTRIVFTDQVLKFLSQDELVY |
| | | | TFGETVALGASGIVIWGSWENTRTKESCG |
| | | | AIKEYMDTTLNPYIINVTLAAKMCSQVLC |
| | | | QEQGVCIRKNWNSSDYLHLNPDNFAIQLE |
| | | | KGGKFTVRGKPTLEDLEQFSEKFYCSCYS |
| | | | TLSCKEKADVKDTDAVDVCIADGVCIDA |
| | | | F |
| HM107 | 206 | One amino acid residue | FRAPPVIPNVPFLWAWNAPSEFCLGKFDE |
| | | I354R is substituted | PLDMSLFSFIGSPRINATGQGVTIFYVDRL |
| | | from SEQ ID NO: 3, | GYYPYIDSITGVTVNGGIPQKISLQDHLDK |
| | | cleavage occurs before | AKKDITFYMPVDNLGMAVIDWEEWRPT |
| | | F38 amino acid residue | WARNWKPKDVYKNRSIELVQQQNVQLS |
| | | at N-terminus of PH20, | LTEATEKAKQEFEKAGKDFLVETIKLGKL |
| | | and cleavage occurs | LRPNHLWGYYLFPDCYNHHYKKPGYNG |
| | | after F468 amino acid | SCFNVEIKRNDDLSWLWNESTALYPSIYL |
| | | residue at C-terminus | NTQQSPVAATLYVRNRVREAIRVSKIPDA |
| | | of PH20. | KSPLPVFAYTRIVFTDQVLKFLSQDELVY |
| | | | TFGETVALGASGIVIWGSWENTRTKESCQ |
| | | | ARKEYMDTTLNPYIINVTLAAKMCSQVL |
| | | | CQEQGVCIRKNWNSSDYLHLNPDNFAIQ |
| | | | LEKGGKFTVRGKPTLEDLEQFSEKFYCSC |
| | | | YSTLSCKEKADVKDTDAVDVCIADGVCI |
| | | | DAF |
| HM110 | 207 | One amino acid residue | FRAPPVIPNVPFLWAWNAPSEFCLGKFDE |
| | | M358R is substituted | PLDMSLFSFIGSPRINATGQGVTIFYVDRL |
| | | from SEQ ID NO: 3, | GYYPYIDSITGVTVNGGIPQKISLQDHLDK |
| | | cleavage occurs before | AKKDITFYMPVDNLGMAVIDWEEWRPT |
| | | F38 amino acid residue | WARNWKPKDVYKNRSIELVQQQNVQLS |
| | | at N-terminus of PH20, | LTEATEKAKQEFEKAGKDFLVETIKLGKL |
| | | and cleavage occurs | LRPNHLWGYYLFPDCYNHHYKKPGYNG |
| | | after F468 amino acid | SCFNVEIKRNDDLSWLWNESTALYPSIYL |
| | | residue at C-terminus | NTQQSPVAATLYVRNRVREAIRVSKIPDA |
| | | of PH20. | KSPLPVFAYTRIVFTDQVLKFLSQDELVY |
| | | | TFGETVALGASGIVIWGSWENTRTKESCQ |
| | | | AIKEYRDTTLNPYIINVTLAAKMCSQVLC |
| | | | QEQGVCIRKNWNSSDYLHLNPDNFAIQLE |
| | | | KGGKFTVRGKPTLEDLEQFSEKFYCSCYS |
| | | | TLSCKEKADVKDTDAVDVCIADGVCIDA |
| | | | F |
| HM111 | 208 | One amino acid residue | FRAPPVIPNVPFLWAWNAPSEFCLGKFDE |
| | | D359V is substituted | PLDMSLFSFIGSPRINATGQGVTIFYVDRL |
| | | from SEQ ID NO: 3, | GYYPYIDSITGVTVNGGIPQKISLQDHLDK |
| | | cleavage occurs before | AKKDITFYMPVDNLGMAVIDWEEWRPT |
| | | F38 amino acid residue | WARNWKPKDVYKNRSIELVQQQNVQLS |
| | | at N-terminus of PH20, | LTEATEKAKQEFEKAGKDFLVETIKLGKL |
| | | and cleavage occurs | LRPNHLWGYYLFPDCYNHHYKKPGYNG |
| | | after F468 amino acid | SCFNVEIKRNDDLSWLWNESTALYPSIYL |
| | | residue at C-terminus | NTQQSPVAATLYVRNRVREAIRVSKIPDA |
| | | of PH20. | KSPLPVFAYTRIVFTDQVLKFLSQDELVY |
| | | | TFGETVALGASGIVIWGSWENTRTKESCQ |
| | | | AIKEYMVTTLNPYIINVTLAAKMCSQVLC |
| | | | QEQGVCIRKNWNSSDYLHLNPDNFAIQLE |
| | | | KGGKFTVRGKPTLEDLEQFSEKFYCSCYS |
| | | | TLSCKEKADVKDTDAVDVCIADGVCIDA |
| | | | F |
| HM112 | 209 | One amino acid residue | FRAPPVIPNVPFLWAWNAPSEFCLGKFDE |
| | | T360R is substituted | PLDMSLFSFIGSPRINATGQGVTIFYVDRL |
| | | from SEQ ID NO: 3, | GYYPYIDSITGVTVNGGIPQKISLQDHLDK |
| | | cleavage occurs before | AKKDITFYMPVDNLGMAVIDWEEWRPT |
| | | F38 amino acid residue | WARNWKPKDVYKNRSIELVQQQNVQLS |
| | | at N-terminus of PH20, | LTEATEKAKQEFEKAGKDFLVETIKLGKL |
| | | and cleavage occurs | LRPNHLWGYYLFPDCYNHHYKKPGYNG |
| | | after F468 amino acid | SCFNVEIKRNDDLSWLWNESTALYPSIYL |
| | | residue at C-terminus | NTQQSPVAATLYVRNRVREAIRVSKIPDA |
| | | of PH20. | KSPLPVFAYTRIVFTDQVLKFLSQDELVY |
| | | | TFGETVALGASGIVIWGSWENTRTKESCQ |
| | | | AIKEYMDRTLNPYIINVTLAAKMCSQVLC |
| | | | QEQGVCIRKNWNSSDYLHLNPDNFAIQLE |
| | | | KGGKFTVRGKPTLEDLEQFSEKFYCSCYS |
| | | | TLSCKEKADVKDTDAVDVCIADGVCIDA |
| | | | F |
| HM114 | 210 | One amino acid residue | FRAPPVIPNVPFLWAWNAPSEFCLGKFDE |
| | | T345K is substituted | PLDMSLFSFIGSPRINATGQGVTIFYVDRL |
| | | from SEQ ID NO: 3, | GYYPYIDSITGVTVNGGIPQKISLQDHLDK |
| | | cleavage occurs before | AKKDITFYMPVDNLGMAVIDWEEWRPT |
| | | F38 amino acid residue | WARNWKPKDVYKNRSIELVQQQNVQLS |
| | | at N-terminus of PH20, | LTEATEKAKQEFEKAGKDFLVETIKLGKL |
| | | and cleavage occurs | LRPNHLWGYYLFPDCYNHHYKKPGYNG |
| | | after F468 amino acid | SCFNVEIKRNDDLSWLWNESTALYPSIYL |
| | | residue at C-terminus | NTQQSPVAATLYVRNRVREAIRVSKIPDA |
| | | of PH20. | KSPLPVFAYTRIVFTDQVLKFLSQDELVY |
| | | | TFGETVALGASGIVIWGSWENKRTKESC |
| | | | QAIKEYMDTTLNPYIINVTLAAKMCSQVL |
| | | | CQEQGVCIRKNWNSSDYLHLNPDNFAIQ |
| | | | LEKGGKFTVRGKPTLEDLEQFSEKFYCSC |
| | | | YSTLSCKEKADVKDTDAVDVCIADGVCI |
| | | | DAF |
| HM115 | 211 | One amino acid residue | FRAPPVIPNVPFLWAWNAPSEFCLGKFDE |
| | | R346L is substituted | PLDMSLFSFIGSPRINATGQGVTIFYVDRL |
| | | from SEQ ID NO: 3, | GYYPYIDSITGVTVNGGIPQKISLQDHLDK |
| | | cleavage occurs before | AKKDITFYMPVDNLGMAVIDWEEWRPT |
| | | F38 amino acid residue | WARNWKPKDVYKNRSIELVQQQNVQLS |
| | | at N-terminus of PH20, | LTEATEKAKQEFEKAGKDFLVETIKLGKL |
| | | and cleavage occurs | LRPNHLWGYYLFPDCYNHHYKKPGYNG |
| | | after F468 amino acid | SCFNVEIKRNDDLSWLWNESTALYPSIYL |
| | | residue at C-terminus | NTQQSPVAATLYVRNRVREAIRVSKIPDA |
| | | of PH20. | KSPLPVFAYTRIVFTDQVLKFLSQDELVY |
| | | | TFGETVALGASGIVIWGSWENTLTKESCQ |
| | | | AIKEYMDTTLNPYIINVTLAAKMCSQVLC |
| | | | QEQGVCIRKNWNSSDYLHLNPDNFAIQLE |
| | | | KGGKFTVRGKPTLEDLEQFSEKFYCSCYS |
| | | | TLSCKEKADVKDTDAVDVCIADGVCIDA |
| | | | F |
| HM116 | 212 | One amino acid residue | FRAPPVIPNVPFLWAWNAPSEFCLGKFDE |
| | | T347V is substituted | PLDMSLFSFIGSPRINATGQGVTIFYVDRL |
| | | from SEQ ID NO: 3, | GYYPYIDSITGVTVNGGIPQKISLQDHLDK |
| | | cleavage occurs before | AKKDITFYMPVDNLGMAVIDWEEWRPT |
| | | F38 amino acid residue | WARNWKPKDVYKNRSIELVQQQNVQLS |
| | | at N-terminus of PH20, | LTEATEKAKQEFEKAGKDFLVETIKLGKL |
| | | and cleavage occurs | LRPNHLWGYYLFPDCYNHHYKKPGYNG |
| | | after F468 amino acid | SCFNVEIKRNDDLSWLWNESTALYPSIYL |
| | | residue at C-terminus | NTQQSPVAATLYVRNRVREAIRVSKIPDA |
| | | of PH20. | KSPLPVFAYTRIVFTDQVLKFLSQDELVY |
| | | | TFGETVALGASGIVIWGSWENTRVKESCQ |
| | | | AIKEYMDTTLNPYIINVTLAAKMCSQVLC |
| | | | QEQGVCIRKNWNSSDYLHLNPDNFAIQLE |
| | | | KGGKFTVRGKPTLEDLEQFSEKFYCSCYS |
| | | | TLSCKEKADVKDTDAVDVCIADGVCIDA |
| | | | F |
| HM117 | 213 | One amino acid residue | FRAPPVIPNVPFLWAWNAPSEFCLGKFDE |
| | | E349W is substituted | PLDMSLFSFIGSPRINATGQGVTIFYVDRL |
| | | from SEQ ID NO: 3, | GYYPYIDSITGVTVNGGIPQKISLQDHLDK |
| | | cleavage occurs before | AKKDITFYMPVDNLGMAVIDWEEWRPT |
| | | F38 amino acid residue | WARNWKPKDVYKNRSIELVQQQNVQLS |
| | | at N-terminus of PH20, | LTEATEKAKQEFEKAGKDFLVETIKLGKL |
| | | and cleavage occurs | LRPNHLWGYYLFPDCYNHHYKKPGYNG |
| | | after F468 amino acid | SCFNVEIKRNDDLSWLWNESTALYPSIYL |
| | | residue at C-terminus | NTQQSPVAATLYVRNRVREAIRVSKIPDA |
| | | of PH20. | KSPLPVFAYTRIVFTDQVLKFLSQDELVY |
| | | | TFGETVALGASGIVIWGSWENTRTKWSC |
| | | | QAIKEYMDTTLNPYIINVTLAAKMCSQVL |
| | | | CQEQGVCIRKNWNSSDYLHLNPDNFAIQ |
| | | | LEKGGKFTVRGKPTLEDLEQFSEKFYCSC |
| | | | YSTLSCKEKADVKDTDAVDVCIADGVCI |
| | | | DAF |
| HM118 | 214 | One amino acid residue | FRAPPVIPNVPFLWAWNAPSEFCLGKFDE |
| | | I354W is substituted | PLDMSLFSFIGSPRINATGQGVTIFYVDRL |
| | | from SEQ ID NO: 3, | GYYPYIDSITGVTVNGGIPQKISLQDHLDK |
| | | cleavage occurs before | AKKDITFYMPVDNLGMAVIDWEEWRPT |
| | | F38 amino acid residue | WARNWKPKDVYKNRSIELVQQQNVQLS |
| | | at N-terminus of PH20, | LTEATEKAKQEFEKAGKDFLVETIKLGKL |
| | | and cleavage occurs | LRPNHLWGYYLFPDCYNHHYKKPGYNG |
| | | after F468 amino acid | SCFNVEIKRNDDLSWLWNESTALYPSIYL |
| | | residue at C-terminus | NTQQSPVAATLYVRNRVREAIRVSKIPDA |
| | | of PH20. | KSPLPVFAYTRIVFTDQVLKFLSQDELVY |
| | | | TFGETVALGASGIVIWGSWENTRTKESCQ |
| | | | AWKEYMDTTLNPYIINVTLAAKMCSQVL |
| | | | CQEQGVCIRKNWNSSDYLHLNPDNFAIQ |
| | | | LEKGGKFTVRGKPTLEDLEQFSEKFYCSC |
| | | | YSTLSCKEKADVKDTDAVDVCIADGVCI |
| | | | DAF |
| HM121 | 215 | One amino acid residue | FRAPPVIPNVPFLWAWNAPSEFCLGKFDE |
| | | D359Y is substituted | PLDMSLFSFIGSPRINATGQGVTIFYVDRL |
| | | from SEQ ID NO: 3, | GYYPYIDSITGVTVNGGIPQKISLQDHLDK |
| | | cleavage occurs before | AKKDITFYMPVDNLGMAVIDWEEWRPT |
| | | F38 amino acid residue | WARNWKPKDVYKNRSIELVQQQNVQLS |
| | | at N-terminus of PH20, | LTEATEKAKQEFEKAGKDFLVETIKLGKL |
| | | and cleavage occurs | LRPNHLWGYYLFPDCYNHHYKKPGYNG |
| | | after F468 amino acid | SCFNVEIKRNDDLSWLWNESTALYPSIYL |
| | | residue at C-terminus | NTQQSPVAATLYVRNRVREAIRVSKIPDA |
| | | of PH20. | KSPLPVFAYTRIVFTDQVLKFLSQDELVY |
| | | | TFGETVALGASGIVIWGSWENTRTKESCQ |
| | | | AIKEYMYTTLNPYIINVTLAAKMCSQVLC |
| | | | QEQGVCIRKNWNSSDYLHLNPDNFAIQLE |
| | | | KGGKFTVRGKPTLEDLEQFSEKFYCSCYS |
| | | | TLSCKEKADVKDTDAVDVCIADGVCIDA |
| | | | F |
| HM125 | 216 | One amino acid residue | FRAPPVIPNVPFLWAWNAPSEFCLGKFDE |
| | | T347W is substituted | PLDMSLFSFIGSPRINATGQGVTIFYVDRL |
| | | from SEQ ID NO: 3, | GYYPYIDSITGVTVNGGIPQKISLQDHLDK |
| | | cleavage occurs before | AKKDITFYMPVDNLGMAVIDWEEWRPT |
| | | F38 amino acid residue | WARNWKPKDVYKNRSIELVQQQNVQLS |
| | | at N-terminus of PH20, | LTEATEKAKQEFEKAGKDFLVETIKLGKL |
| | | and cleavage occurs | LRPNHLWGYYLFPDCYNHHYKKPGYNG |
| | | after F468 amino acid | SCFNVEIKRNDDLSWLWNESTALYPSIYL |
| | | residue at C-terminus | NTQQSPVAATLYVRNRVREAIRVSKIPDA |
| | | of PH20. | KSPLPVFAYTRIVFTDQVLKFLSQDELVY |
| | | | TFGETVALGASGIVIWGSWENTRWKESC |
| | | | QAIKEYMDTTLNPYIINVTLAAKMCSQVL |
| | | | CQEQGVCIRKNWNSSDYLHLNPDNFAIQ |
| | | | LEKGGKFTVRGKPTLEDLEQFSEKFYCSC |
| | | | YSTLSCKEKADVKDTDAVDVCIADGVCI |
| | | | DAF |
| HM126 | 217 | One amino acid residue | FRAPPVIPNVPFLWAWNAPSEFCLGKFDE |
| | | Y357W is substituted | PLDMSLFSFIGSPRINATGQGVTIFYVDRL |
| | | from SEQ ID NO: 3, | GYYPYIDSITGVTVNGGIPQKISLQDHLDK |
| | | cleavage occurs before | AKKDITFYMPVDNLGMAVIDWEEWRPT |
| | | F38 amino acid residue | WARNWKPKDVYKNRSIELVQQQNVQLS |
| | | at N-terminus of PH20, | LTEATEKAKQEFEKAGKDFLVETIKLGKL |
| | | and cleavage occurs | LRPNHLWGYYLFPDCYNHHYKKPGYNG |
| | | after F468 amino acid | SCFNVEIKRNDDLSWLWNESTALYPSIYL |
| | | residue at C-terminus | NTQQSPVAATLYVRNRVREAIRVSKIPDA |
| | | of PH20. | KSPLPVFAYTRIVFTDQVLKFLSQDELVY |
| | | | TFGETVALGASGIVIWGSWENTRTKESCQ |
| | | | AIKEWMDTTLNPYIINVTLAAKMCSQVL |
| | | | CQEQGVCIRKNWNSSDYLHLNPDNFAIQ |
| | | | LEKGGKFTVRGKPTLEDLEQFSEKFYCSC |
| | | | YSTLSCKEKADVKDTDAVDVCIADGVCI |
| | | | DAF |
| HM130 | 218 | One amino acid residue | FRAPPVIPNVPFLWAWNAPSEFCLGKFDE |
| | | W342D is substituted | PLDMSLFSFIGSPRINATGQGVTIFYVDRL |
| | | from SEQ ID NO: 3, | GYYPYIDSITGVTVNGGIPQKISLQDHLDK |
| | | cleavage occurs before | AKKDITFYMPVDNLGMAVIDWEEWRPT |
| | | F38 amino acid residue | WARNWKPKDVYKNRSIELVQQQNVQLS |
| | | at N-terminus of PH20, | LTEATEKAKQEFEKAGKDFLVETIKLGKL |
| | | and cleavage occurs | LRPNHLWGYYLFPDCYNHHYKKPGYNG |
| | | after F468 amino acid | SCFNVEIKRNDDLSWLWNESTALYPSIYL |
| | | residue at C-terminus | NTQQSPVAATLYVRNRVREAIRVSKIPDA |
| | | of PH20. | KSPLPVFAYTRIVFTDQVLKFLSQDELVY |
| | | | TFGETVALGASGIVIWGSDENTRTKESCQ |
| | | | AIKEYMDTTLNPYIINVTLAAKMCSQVLC |
| | | | QEQGVCIRKNWNSSDYLHLNPDNFAIQLE |
| | | | KGGKFTVRGKPTLEDLEQFSEKFYCSCYS |
| | | | TLSCKEKADVKDTDAVDVCIADGVCIDA |
| | | | F |
| HM131 | 219 | One amino acid residue | FRAPPVIPNVPFLWAWNAPSEFCLGKFDE |
| | | E343Q is substituted | PLDMSLFSFIGSPRINATGQGVTIFYVDRL |
| | | from SEQ ID NO: 3, | GYYPYIDSITGVTVNGGIPQKISLQDHLDK |
| | | cleavage occurs before | AKKDITFYMPVDNLGMAVIDWEEWRPT |
| | | F38 amino acid residue | WARNWKPKDVYKNRSIELVQQQNVQLS |
| | | at N-terminus of PH20, | LTEATEKAKQEFEKAGKDFLVETIKLGKL |
| | | and cleavage occurs | LRPNHLWGYYLFPDCYNHHYKKPGYNG |
| | | after F468 amino acid | SCFNVEIKRNDDLSWLWNESTALYPSIYL |
| | | residue at C-terminus | NTQQSPVAATLYVRNRVREAIRVSKIPDA |
| | | of PH20. | KSPLPVFAYTRIVFTDQVLKFLSQDELVY |
| | | | TFGETVALGASGIVIWGSWQNTRTKESC |
| | | | QAIKEYMDTTLNPYIINVTLAAKMCSQVL |
| | | | CQEQGVCIRKNWNSSDYLHLNPDNFAIQ |
| | | | LEKGGKFTVRGKPTLEDLEQFSEKFYCSC |
| | | | YSTLSCKEKADVKDTDAVDVCIADGVCI |
| | | | DAF |
| HM132 | 220 | One amino acid residue | FRAPPVIPNVPFLWAWNAPSEFCLGKFDE |
| | | T347H is substituted | PLDMSLFSFIGSPRINATGQGVTIFYVDRL |
| | | from SEQ ID NO: 3, | GYYPYIDSITGVTVNGGIPQKISLQDHLDK |
| | | cleavage occurs before | AKKDITFYMPVDNLGMAVIDWEEWRPT |
| | | F38 amino acid residue | WARNWKPKDVYKNRSIELVQQQNVQLS |
| | | at N-terminus of PH20, | LTEATEKAKQEFEKAGKDFLVETIKLGKL |
| | | and cleavage occurs | LRPNHLWGYYLFPDCYNHHYKKPGYNG |
| | | after F468 amino acid | SCFNVEIKRNDDLSWLWNESTALYPSIYL |
| | | residue at C-terminus | NTQQSPVAATLYVRNRVREAIRVSKIPDA |
| | | of PH20. | KSPLPVFAYTRIVFTDQVLKFLSQDELVY |
| | | | TFGETVALGASGIVIWGSWENTRHKESC |
| | | | QAIKEYMDTTLNPYIINVTLAAKMCSQVL |
| | | | CQEQGVCIRKNWNSSDYLHLNPDNFAIQ |
| | | | LEKGGKFTVRGKPTLEDLEQFSEKFYCSC |
| | | | YSTLSCKEKADVKDTDAVDVCIADGVCI |
| | | | DAF |
| HM133 | 221 | One amino acid residue | FRAPPVIPNVPFLWAWNAPSEFCLGKFDE |
| | | K348F is substituted | PLDMSLFSFIGSPRINATGQGVTIFYVDRL |
| | | from SEQ ID NO: 3, | GYYPYIDSITGVTVNGGIPQKISLQDHLDK |
| | | cleavage occurs before | AKKDITFYMPVDNLGMAVIDWEEWRPT |
| | | F38 amino acid residue | WARNWKPKDVYKNRSIELVQQQNVQLS |
| | | at N-terminus of PH20, | LTEATEKAKQEFEKAGKDFLVETIKLGKL |
| | | and cleavage occurs | LRPNHLWGYYLFPDCYNHHYKKPGYNG |
| | | after F468 amino acid | SCFNVEIKRNDDLSWLWNESTALYPSIYL |
| | | residue at C-terminus | NTQQSPVAATLYVRNRVREAIRVSKIPDA |
| | | of PH20. | KSPLPVFAYTRIVFTDQVLKFLSQDELVY |
| | | | TFGETVALGASGIVIWGSWENTRTFESCQ |
| | | | AIKEYMDTTLNPYIINVTLAAKMCSQVLC |
| | | | QEQGVCIRKNWNSSDYLHLNPDNFAIQLE |
| | | | KGGKFTVRGKPTLEDLEQFSEKFYCSCYS |
| | | | TLSCKEKADVKDTDAVDVCIADGVCIDA |
| | | | F |
| HM134 | 222 | One amino acid residue | FRAPPVIPNVPFLWAWNAPSEFCLGKFDE |
| | | S350D is substituted | PLDMSLFSFIGSPRINATGQGVTIFYVDRL |
| | | from SEQ ID NO: 3, | GYYPYIDSITGVTVNGGIPQKISLQDHLDK |
| | | cleavage occurs before | AKKDITFYMPVDNLGMAVIDWEEWRPT |
| | | F38 amino acid residue | WARNWKPKDVYKNRSIELVQQQNVQLS |
| | | at N-terminus of PH20, | LTEATEKAKQEFEKAGKDFLVETIKLGKL |
| | | and cleavage occurs | LRPNHLWGYYLFPDCYNHHYKKPGYNG |
| | | after F468 amino acid | SCFNVEIKRNDDLSWLWNESTALYPSIYL |
| | | residue at C-terminus | NTQQSPVAATLYVRNRVREAIRVSKIPDA |
| | | of PH20. | KSPLPVFAYTRIVFTDQVLKFLSQDELVY |
| | | | TFGETVALGASGIVIWGSWENTRTKEDC |
| | | | QAIKEYMDTTLNPYIINVTLAAKMCSQVL |
| | | | CQEQGVCIRKNWNSSDYLHLNPDNFAIQ |
| | | | LEKGGKFTVRGKPTLEDLEQFSEKFYCSC |
| | | | YSTLSCKEKADVKDTDAVDVCIADGVCI |
| | | | DAF |
| HM135 | 223 | One amino acid residue | FRAPPVIPNVPFLWAWNAPSEFCLGKFDE |
| | | Q352Y is substituted | PLDMSLFSFIGSPRINATGQGVTIFYVDRL |
| | | from SEQ ID NO: 3, | GYYPYIDSITGVTVNGGIPQKISLQDHLDK |
| | | cleavage occurs before | AKKDITFYMPVDNLGMAVIDWEEWRPT |
| | | F38 amino acid residue | WARNWKPKDVYKNRSIELVQQQNVQLS |
| | | at N-terminus of PH20, | LTEATEKAKQEFEKAGKDFLVETIKLGKL |
| | | and cleavage occurs | LRPNHLWGYYLFPDCYNHHYKKPGYNG |
| | | after F468 amino acid | SCFNVEIKRNDDLSWLWNESTALYPSIYL |
| | | residue at C-terminus | NTQQSPVAATLYVRNRVREAIRVSKIPDA |
| | | of PH20. | KSPLPVFAYTRIVFTDQVLKFLSQDELVY |
| | | | TFGETVALGASGIVIWGSWENTRTKESCY |
| | | | AIKEYMDTTLNPYIINVTLAAKMCSQVLC |
| | | | QEQGVCIRKNWNSSDYLHLNPDNFAIQLE |
| | | | KGGKFTVRGKPTLEDLEQFSEKFYCSCYS |
| | | | TLSCKEKADVKDTDAVDVCIADGVCIDA |
| | | | F |
| HM136 | 224 | One amino acid residue | FRAPPVIPNVPFLWAWNAPSEFCLGKFDE |
| | | A353E is substituted | PLDMSLFSFIGSPRINATGQGVTIFYVDRL |
| | | from SEQ ID NO: 3, | GYYPYIDSITGVTVNGGIPQKISLQDHLDK |
| | | cleavage occurs before | AKKDITFYMPVDNLGMAVIDWEEWRPT |
| | | F38 amino acid residue | WARNWKPKDVYKNRSIELVQQQNVQLS |
| | | at N-terminus of PH20, | LTEATEKAKQEFEKAGKDFLVETIKLGKL |
| | | and cleavage occurs | LRPNHLWGYYLFPDCYNHHYKKPGYNG |
| | | after F468 amino acid | SCFNVEIKRNDDLSWLWNESTALYPSIYL |
| | | residue at C-terminus | NTQQSPVAATLYVRNRVREAIRVSKIPDA |
| | | of PH20. | KSPLPVFAYTRIVFTDQVLKFLSQDELVY |
| | | | TFGETVALGASGIVIWGSWENTRTKESCQ |
| | | | EIKEYMDTTLNPYIINVTLAAKMCSQVLC |
| | | | QEQGVCIRKNWNSSDYLHLNPDNFAIQLE |
| | | | KGGKFTVRGKPTLEDLEQFSEKFYCSCYS |
| | | | TLSCKEKADVKDTDAVDVCIADGVCIDA |
| | | | F |
| HM138 | 225 | One amino acid residue | FRAPPVIPNVPFLWAWNAPSEFCLGKFDE |
| | | M358Y is substituted | PLDMSLFSFIGSPRINATGQGVTIFYVDRL |
| | | from SEQ ID NO: 3, | GYYPYIDSITGVTVNGGIPQKISLQDHLDK |
| | | cleavage occurs before | AKKDITFYMPVDNLGMAVIDWEEWRPT |
| | | F38 amino acid residue | WARNWKPKDVYKNRSIELVQQQNVQLS |
| | | at N-terminus of PH20, | LTEATEKAKQEFEKAGKDFLVETIKLGKL |
| | | and cleavage occurs | LRPNHLWGYYLFPDCYNHHYKKPGYNG |
| | | after F468 amino acid | SCFNVEIKRNDDLSWLWNESTALYPSIYL |
| | | residue at C-terminus | NTQQSPVAATLYVRNRVREAIRVSKIPDA |
| | | of PH20. | KSPLPVFAYTRIVFTDQVLKFLSQDELVY |
| | | | TFGETVALGASGIVIWGSWENTRTKESCQ |
| | | | AIKEYYDTTLNPYIINVTLAAKMCSQVLC |
| | | | QEQGVCIRKNWNSSDYLHLNPDNFAIQLE |
| | | | KGGKFTVRGKPTLEDLEQFSEKFYCSCYS |
| | | | TLSCKEKADVKDTDAVDVCIADGVCIDA |
| | | | F |
| HM139 | 226 | One amino acid residue | FRAPPVIPNVPFLWAWNAPSEFCLGKFDE |
| | | D359Q is substituted | PLDMSLFSFIGSPRINATGQGVTIFYVDRL |
| | | from SEQ ID NO: 3, | GYYPYIDSITGVTVNGGIPQKISLQDHLDK |
| | | cleavage occurs before | AKKDITFYMPVDNLGMAVIDWEEWRPT |
| | | F38 amino acid residue | WARNWKPKDVYKNRSIELVQQQNVQLS |
| | | at N-terminus of PH20, | LTEATEKAKQEFEKAGKDFLVETIKLGKL |
| | | and cleavage occurs | LRPNHLWGYYLFPDCYNHHYKKPGYNG |
| | | after F468 amino acid | SCFNVEIKRNDDLSWLWNESTALYPSIYL |
| | | residue at C-terminus | NTQQSPVAATLYVRNRVREAIRVSKIPDA |
| | | of PH20. | KSPLPVFAYTRIVFTDQVLKFLSQDELVY |
| | | | TFGETVALGASGIVIWGSWENTRTKESCQ |
| | | | AIKEYMQTTLNPYIINVTLAAKMCSQVLC |
| | | | QEQGVCIRKNWNSSDYLHLNPDNFAIQLE |
| | | | KGGKFTVRGKPTLEDLEQFSEKFYCSCYS |
| | | | TLSCKEKADVKDTDAVDVCIADGVCIDA |
| | | | F |
| HM140 | 227 | One amino acid residue | FRAPPVIPNVPFLWAWNAPSEFCLGKFDE |
| | | T360L is substituted | PLDMSLFSFIGSPRINATGQGVTIFYVDRL |
| | | from SEQ ID NO: 3, | GYYPYIDSITGVTVNGGIPQKISLQDHLDK |
| | | cleavage occurs before | AKKDITFYMPVDNLGMAVIDWEEWRPT |
| | | F38 amino acid residue | WARNWKPKDVYKNRSIELVQQQNVQLS |
| | | at N-terminus of PH20, | LTEATEKAKQEFEKAGKDFLVETIKLGKL |
| | | and cleavage occurs | LRPNHLWGYYLFPDCYNHHYKKPGYNG |
| | | after F468 amino acid | SCFNVEIKRNDDLSWLWNESTALYPSIYL |
| | | residue at C-terminus | NTQQSPVAATLYVRNRVREAIRVSKIPDA |
| | | of PH20. | KSPLPVFAYTRIVFTDQVLKFLSQDELVY |
| | | | TFGETVALGASGIVIWGSWENTRTKESCQ |
| | | | AIKEYMDLTLNPYIINVTLAAKMCSQVLC |
| | | | QEQGVCIRKNWNSSDYLHLNPDNFAIQLE |
| | | | KGGKFTVRGKPTLEDLEQFSEKFYCSCYS |
| | | | TLSCKEKADVKDTDAVDVCIADGVCIDA |
| | | | F |
| HM141 | 228 | One amino acid residue | FRAPPVIPNVPFLWAWNAPSEFCLGKFDE |
| | | T361E is substituted | PLDMSLFSFIGSPRINATGQGVTIFYVDRL |
| | | from SEQ ID NO: 3, | GYYPYIDSITGVTVNGGIPQKISLQDHLDK |
| | | cleavage occurs before | AKKDITFYMPVDNLGMAVIDWEEWRPT |
| | | F38 amino acid residue | WARNWKPKDVYKNRSIELVQQQNVQLS |
| | | at N-terminus of PH20, | LTEATEKAKQEFEKAGKDFLVETIKLGKL |
| | | and cleavage occurs | LRPNHLWGYYLFPDCYNHHYKKPGYNG |
| | | after F468 amino acid | SCFNVEIKRNDDLSWLWNESTALYPSIYL |
| | | residue at C-terminus | NTQQSPVAATLYVRNRVREAIRVSKIPDA |
| | | of PH20. | KSPLPVFAYTRIVFTDQVLKFLSQDELVY |
| | | | TFGETVALGASGIVIWGSWENTRTKESCQ |
| | | | AIKEYMDTELNPYIINVTLAAKMCSQVLC |
| | | | QEQGVCIRKNWNSSDYLHLNPDNFAIQLE |
| | | | KGGKFTVRGKPTLEDLEQFSEKFYCSCYS |
| | | | TLSCKEKADVKDTDAVDVCIADGVCIDA |
| | | | F |
| HM142 | 229 | One amino acid residue | FRAPPVIPNVPFLWAWNAPSEFCLGKFDE |
| | | N363E is substituted | PLDMSLFSFIGSPRINATGQGVTIFYVDRL |
| | | from SEQ ID NO: 3, | GYYPYIDSITGVTVNGGIPQKISLQDHLDK |
| | | cleavage occurs before | AKKDITFYMPVDNLGMAVIDWEEWRPT |
| | | F38 amino acid residue | WARNWKPKDVYKNRSIELVQQQNVQLS |
| | | at N-terminus of PH20, | LTEATEKAKQEFEKAGKDFLVETIKLGKL |
| | | and cleavage occurs | LRPNHLWGYYLFPDCYNHHYKKPGYNG |
| | | after F468 amino acid | SCFNVEIKRNDDLSWLWNESTALYPSIYL |
| | | residue at C-terminus | NTQQSPVAATLYVRNRVREAIRVSKIPDA |
| | | of PH20. | KSPLPVFAYTRIVFTDQVLKFLSQDELVY |
| | | | TFGETVALGASGIVIWGSWENTRTKESCQ |
| | | | AIKEYMDTTLEPYIINVTLAAKMCSQVLC |
| | | | QEQGVCIRKNWNSSDYLHLNPDNFAIQLE |
| | | | KGGKFTVRGKPTLEDLEQFSEKFYCSCYS |
| | | | TLSCKEKADVKDTDAVDVCIADGVCIDA |
| | | | F |
| HM143 | 230 | One amino acid residue | FRAPPVIPNVPFLWAWNAPSEFCLGKFDE |
| | | W342H is substituted | PLDMSLFSFIGSPRINATGQGVTIFYVDRL |
| | | from SEQ ID NO: 3, | GYYPYIDSITGVTVNGGIPQKISLQDHLDK |
| | | cleavage occurs before | AKKDITFYMPVDNLGMAVIDWEEWRPT |
| | | F38 amino acid residue | WARNWKPKDVYKNRSIELVQQQNVQLS |
| | | at N-terminus of PH20, | LTEATEKAKQEFEKAGKDFLVETIKLGKL |
| | | and cleavage occurs | LRPNHLWGYYLFPDCYNHHYKKPGYNG |
| | | after F468 amino acid | SCFNVEIKRNDDLSWLWNESTALYPSIYL |
| | | residue at C-terminus | NTQQSPVAATLYVRNRVREAIRVSKIPDA |
| | | of PH20. | KSPLPVFAYTRIVFTDQVLKFLSQDELVY |
| | | | TFGETVALGASGIVIWGSHENTRTKESCQ |
| | | | AIKEYMDTTLNPYIINVTLAAKMCSQVLC |
| | | | QEQGVCIRKNWNSSDYLHLNPDNFAIQLE |
| | | | KGGKFTVRGKPTLEDLEQFSEKFYCSCYS |
| | | | TLSCKEKADVKDTDAVDVCIADGVCIDA |
| | | | F |
| HM144 | 231 | One amino acid residue | FRAPPVIPNVPFLWAWNAPSEFCLGKFDE |
| | | K348D is substituted | PLDMSLFSFIGSPRINATGQGVTIFYVDRL |
| | | from SEQ ID NO: 3, | GYYPYIDSITGVTVNGGIPQKISLQDHLDK |
| | | cleavage occurs before | AKKDITFYMPVDNLGMAVIDWEEWRPT |
| | | F38 amino acid residue | WARNWKPKDVYKNRSIELVQQQNVQLS |
| | | at N-terminus of PH20, | LTEATEKAKQEFEKAGKDFLVETIKLGKL |
| | | and cleavage occurs | LRPNHLWGYYLFPDCYNHHYKKPGYNG |
| | | after F468 amino acid | SCFNVEIKRNDDLSWLWNESTALYPSIYL |
| | | residue at C-terminus | NTQQSPVAATLYVRNRVREAIRVSKIPDA |
| | | of PH20. | KSPLPVFAYTRIVFTDQVLKFLSQDELVY |
| | | | TFGETVALGASGIVIWGSWENTRTDESCQ |
| | | | AIKEYMDTTLNPYIINVTLAAKMCSQVLC |
| | | | QEQGVCIRKNWNSSDYLHLNPDNFAIQLE |
| | | | KGGKFTVRGKPTLEDLEQFSEKFYCSCYS |
| | | | TLSCKEKADVKDTDAVDVCIADGVCIDA |
| | | | F |
| HM145 | 232 | One amino acid residue | FRAPPVIPNVPFLWAWNAPSEFCLGKFDE |
| | | T361H is substituted | PLDMSLFSFIGSPRINATGQGVTIFYVDRL |
| | | from SEQ ID NO: 3, | GYYPYIDSITGVTVNGGIPQKISLQDHLDK |
| | | cleavage occurs before | AKKDITFYMPVDNLGMAVIDWEEWRPT |
| | | F38 amino acid residue | WARNWKPKDVYKNRSIELVQQQNVQLS |
| | | at N-terminus of PH20, | LTEATEKAKQEFEKAGKDFLVETIKLGKL |
| | | and cleavage occurs | LRPNHLWGYYLFPDCYNHHYKKPGYNG |
| | | after F468 amino acid | SCFNVEIKRNDDLSWLWNESTALYPSIYL |
| | | residue at C-terminus | NTQQSPVAATLYVRNRVREAIRVSKIPDA |
| | | of PH20. | KSPLPVFAYTRIVFTDQVLKFLSQDELVY |
| | | | TFGETVALGASGIVIWGSWENTRTKESCQ |
| | | | AIKEYMDTHLNPYIINVTLAAKMCSQVLC |
| | | | QEQGVCIRKNWNSSDYLHLNPDNFAIQLE |
| | | | KGGKFTVRGKPTLEDLEQFSEKFYCSCYS |
| | | | TLSCKEKADVKDTDAVDVCIADGVCIDA |
| | | | F |
| HM146 | 233 | No additional | RAPPVIPNVPFLWAWNAPSEFCLGKFDEP |
| | | substitution occurs, | LDMSLFSFIGSPRINATGQGVTIFYVDRLG |
| | | cleavage occurs before | YYPYIDSITGVTVNGGIPQKISLQDHLDKA |
| | | R39 amino acid residue | KKDITFYMPVDNLGMAVIDWEEWRPTW |
| | | at N-terminus of PH20, | ARNWKPKDVYKNRSIELVQQQNVQLSLT |
| | | and cleavage occurs | EATEKAKQEFEKAGKDFLVETIKLGKLLR |
| | | after F468 amino acid | PNHLWGYYLFPDCYNHHYKKPGYNGSC |
| | | residue at C-terminus | FNVEIKRNDDLSWLWNESTALYPSIYLNT |
| | | of PH20. | QQSPVAATLYVRNRVREAIRVSKIPDAKS |
| | | | PLPVFAYTRIVFTDQVLKFLSQDELVYTF |
| | | | GETVALGASGIVIWGSWENTRTKESCQAI |
| | | | KEYMDTTLNPYIINVTLAAKMCSQVLCQ |
| | | | EQGVCIRKNWNSSDYLHLNPDNFAIQLEK |
| | | | GGKFTVRGKPTLEDLEQFSEKFYCSCYST |
| | | | LSCKEKADVKDTDAVDVCIADGVCIDAF |
| HM147 | 234 | No additional | APPVIPNVPFLWAWNAPSEFCLGKFDEPL |
| | | substitution occurs, | DMSLFSFIGSPRINATGQGVTIFYVDRLGY |
| | | cleavage occurs before | YPYIDSITGVTVNGGIPQKISLQDHLDKAK |
| | | A40 amino acid residue | KDITFYMPVDNLGMAVIDWEEWRPTWA |
| | | at N-terminus of PH20, | RNWKPKDVYKNRSIELVQQQNVQLSLTE |
| | | and cleavage occurs | ATEKAKQEFEKAGKDFLVETIKLGKLLRP |
| | | after F468 amino acid | NHLWGYYLFPDCYNHHYKKPGYNGSCF |
| | | residue at C-terminus | NVEIKRNDDLSWLWNESTALYPSIYLNTQ |
| | | of PH20. | QSPVAATLYVRNRVREAIRVSKIPDAKSP |
| | | | LPVFAYTRIVFTDQVLKFLSQDELVYTFG |
| | | | ETVALGASGIVIWGSWENTRTKESCQAIK |
| | | | EYMDTTLNPYIINVTLAAKMCSQVLCQE |
| | | | QGVCIRKNWNSSDYLHLNPDNFAIQLEK |
| | | | GGKFTVRGKPTLEDLEQFSEKFYCSCYST |
| | | | LSCKEKADVKDTDAVDVCIADGVCIDAF |
| HM149 | 235 | No additional | FRAPPVIPNVPFLWAWNAPSEFCLGKFDE |
| | | substitution occurs, | PLDMSLFSFIGSPRINATGQGVTIFYVDRL |
| | | cleavage occurs before | GYYPYIDSITGVTVNGGIPQKISLQDHLDK |
| | | F38 amino acid residue | AKKDITFYMPVDNLGMAVIDWEEWRPT |
| | | at N-terminus of PH20, | WARNWKPKDVYKNRSIELVQQQNVQLS |
| | | and cleavage occurs | LTEATEKAKQEFEKAGKDFLVETIKLGKL |
| | | after D456 amino acid | LRPNHLWGYYLFPDCYNHHYKKPGYNG |
| | | residue at C-terminus | SCFNVEIKRNDDLSWLWNESTALYPSIYL |
| | | of PH20. | NTQQSPVAATLYVRNRVREAIRVSKIPDA |
| | | | KSPLPVFAYTRIVFTDQVLKFLSQDELVY |
| | | | TFGETVALGASGIVIWGSWENTRTKESCQ |
| | | | AIKEYMDTTLNPYIINVTLAAKMCSQVLC |
| | | | QEQGVCIRKNWNSSDYLHLNPDNFAIQLE |
| | | | KGGKFTVRGKPTLEDLEQFSEKFYCSCYS |
| | | | TLSCKEKADVKDTDAVD |
| HM150 | 236 | 2 amino acid residues | RAPPVIPNVPFLWAWNAPSEFCLGKFDEP |
| | | S350Q and T360R are | LDMSLFSFIGSPRINATGQGVTIFYVDRLG |
| | | substituted from SEQ | YYPYIDSITGVTVNGGIPQKISLQDHLDKA |
| | | ID NO: 3, cleavage | KKDITFYMPVDNLGMAVIDWEEWRPTW |
| | | occurs before R39 | ARNWKPKDVYKNRSIELVQQQNVQLSLT |
| | | amino acid residue at | EATEKAKQEFEKAGKDFLVETIKLGKLLR |
| | | N-terminus of PH20, | PNHLWGYYLFPDCYNHHYKKPGYNGSC |
| | | and cleavage occurs | FNVEIKRNDDLSWLWNESTALYPSIYLNT |
| | | after F468 amino acid | QQSPVAATLYVRNRVREAIRVSKIPDAKS |
| | | residue at C-terminus | PLPVFAYTRIVFTDQVLKFLSQDELVYTF |
| | | of PH20. | GETVALGASGIVIWGSWENTRTKEQCQAI |
| | | | KEYMDRTLNPYIINVTLAAKMCSQVLCQ |
| | | | EQGVCIRKNWNSSDYLHLNPDNFAIQLEK |
| | | | GGKFTVRGKPTLEDLEQFSEKFYCSCYST |
| | | | LSCKEKADVKDTDAVDVCIADGVCIDAF |
| HM152 | 237 | One amino acid residue | FRAPPVIPNVPFLWAWNAPSEFCLGKFAE |
| | | D65A is substituted | PLDMSLFSFIGSPRINATGQGVTIFYVDRL |
| | | from SEQ ID NO: 3, | GYYPYIDSITGVTVNGGIPQKISLQDHLDK |
| | | cleavage occurs before | AKKDITFYMPVDNLGMAVIDWEEWRPT |
| | | F38 amino acid residue | WARNWKPKDVYKNRSIELVQQQNVQLS |
| | | at N-terminus of PH20, | LTEATEKAKQEFEKAGKDFLVETIKLGKL |
| | | and cleavage occurs | LRPNHLWGYYLFPDCYNHHYKKPGYNG |
| | | after F468 amino acid | SCFNVEIKRNDDLSWLWNESTALYPSIYL |
| | | residue at C-terminus | NTQQSPVAATLYVRNRVREAIRVSKIPDA |
| | | of PH20. | KSPLPVFAYTRIVFTDQVLKFLSQDELVY |
| | | | TFGETVALGASGIVIWGSWENTRTKESCQ |
| | | | AIKEYMDTTLNPYIINVTLAAKMCSQVLC |
| | | | QEQGVCIRKNWNSSDYLHLNPDNFAIQLE |
| | | | KGGKFTVRGKPTLEDLEQFSEKFYCSCYS |
| | | | TLSCKEKADVKDTDAVDVCIADGVCIDA |
| | | | F |
| HM153 | 238 | One amino acid residue | FRAPPVIPNVPFLWAWNAPSEFCLGKFDA |
| | | E66A is substituted | PLDMSLFSFIGSPRINATGQGVTIFYVDRL |
| | | from SEQ ID NO: 3, | GYYPYIDSITGVTVNGGIPQKISLQDHLDK |
| | | cleavage occurs before | AKKDITFYMPVDNLGMAVIDWEEWRPT |
| | | F38 amino acid residue | WARNWKPKDVYKNRSIELVQQQNVQLS |
| | | at N-terminus of PH20, | LTEATEKAKQEFEKAGKDFLVETIKLGKL |
| | | and cleavage occurs | LRPNHLWGYYLFPDCYNHHYKKPGYNG |
| | | after F468 amino acid | SCFNVEIKRNDDLSWLWNESTALYPSIYL |
| | | residue at C-terminus | NTQQSPVAATLYVRNRVREAIRVSKIPDA |
| | | of PH20. | KSPLPVFAYTRIVFTDQVLKFLSQDELVY |
| | | | TFGETVALGASGIVIWGSWENTRTKESCQ |
| | | | AIKEYMDTTLNPYIINVTLAAKMCSQVLC |
| | | | QEQGVCIRKNWNSSDYLHLNPDNFAIQLE |
| | | | KGGKFTVRGKPTLEDLEQFSEKFYCSCYS |
| | | | TLSCKEKADVKDTDAVDVCIADGVCIDA |
| | | | F |
| HM154 | 239 | One amino acid residue | FRAPPVIPNVPFLWAWNAPSEFCLGKFDE |
| | | P67A is substituted | ALDMSLFSFIGSPRINATGQGVTIFYVDRL |
| | | from SEQ ID NO: 3, | GYYPYIDSITGVTVNGGIPQKISLQDHLDK |
| | | cleavage occurs before | AKKDITFYMPVDNLGMAVIDWEEWRPT |
| | | F38 amino acid residue | WARNWKPKDVYKNRSIELVQQQNVQLS |
| | | at N-terminus of PH20, | LTEATEKAKQEFEKAGKDFLVETIKLGKL |
| | | and cleavage occurs | LRPNHLWGYYLFPDCYNHHYKKPGYNG |
| | | after F468 amino acid | SCFNVEIKRNDDLSWLWNESTALYPSIYL |
| | | residue at C-terminus | NTQQSPVAATLYVRNRVREAIRVSKIPDA |
| | | of PH20. | KSPLPVFAYTRIVFTDQVLKFLSQDELVY |
| | | | TFGETVALGASGIVIWGSWENTRTKESCQ |
| | | | AIKEYMDTTLNPYIINVTLAAKMCSQVLC |
| | | | QEQGVCIRKNWNSSDYLHLNPDNFAIQLE |
| | | | KGGKFTVRGKPTLEDLEQFSEKFYCSCYS |
| | | | TLSCKEKADVKDTDAVDVCIADGVCIDA |
| | | | F |
| HM155 | 240 | One amino acid residue | FRAPPVIPNVPFLWAWNAPSEFCLGKFDE |
| | | L68A is substituted | PADMSLFSFIGSPRINATGQGVTIFYVDRL |
| | | from SEQ ID NO: 3, | GYYPYIDSITGVTVNGGIPQKISLQDHLDK |
| | | cleavage occurs before | AKKDITFYMPVDNLGMAVIDWEEWRPT |
| | | F38 amino acid residue | WARNWKPKDVYKNRSIELVQQQNVQLS |
| | | at N-terminus of PH20, | LTEATEKAKQEFEKAGKDFLVETIKLGKL |
| | | and cleavage occurs | LRPNHLWGYYLFPDCYNHHYKKPGYNG |
| | | after F468 amino acid | SCFNVEIKRNDDLSWLWNESTALYPSIYL |
| | | residue at C-terminus | NTQQSPVAATLYVRNRVREAIRVSKIPDA |
| | | of PH20. | KSPLPVFAYTRIVFTDQVLKFLSQDELVY |
| | | | TFGETVALGASGIVIWGSWENTRTKESCQ |
| | | | AIKEYMDTTLNPYIINVTLAAKMCSQVLC |
| | | | QEQGVCIRKNWNSSDYLHLNPDNFAIQLE |
| | | | KGGKFTVRGKPTLEDLEQFSEKFYCSCYS |
| | | | TLSCKEKADVKDTDAVDVCIADGVCIDA |
| | | | F |
| HM156 | 241 | One amino acid residue | FRAPPVIPNVPFLWAWNAPSEFCLGKFDE |
| | | Q311A is substituted | PLDMSLFSFIGSPRINATGQGVTIFYVDRL |
| | | from SEQ ID NO: 3, | GYYPYIDSITGVTVNGGIPQKISLQDHLDK |
| | | cleavage occurs before | AKKDITFYMPVDNLGMAVIDWEEWRPT |
| | | F38 amino acid residue | WARNWKPKDVYKNRSIELVQQQNVQLS |
| | | at N-terminus of PH20, | LTEATEKAKQEFEKAGKDFLVETIKLGKL |
| | | and cleavage occurs | LRPNHLWGYYLFPDCYNHHYKKPGYNG |
| | | after F468 amino acid | SCFNVEIKRNDDLSWLWNESTALYPSIYL |
| | | residue at C-terminus | NTQQSPVAATLYVRNRVREAIRVSKIPDA |
| | | of PH20. | KSPLPVFAYTRIVFTDAVLKFLSQDELVY |
| | | | TFGETVALGASGIVIWGSWENTRTKESCQ |
| | | | AIKEYMDTTLNPYIINVTLAAKMCSQVLC |
| | | | QEQGVCIRKNWNSSDYLHLNPDNFAIQLE |
| | | | KGGKFTVRGKPTLEDLEQFSEKFYCSCYS |
| | | | TLSCKEKADVKDTDAVDVCIADGVCIDA |
| | | | F |
| HM157 | 242 | One amino acid residue | FRAPPVIPNVPFLWAWNAPSEFCLGKFDE |
| | | V312A is substituted | PLDMSLFSFIGSPRINATGQGVTIFYVDRL |
| | | from SEQ ID NO: 3, | GYYPYIDSITGVTVNGGIPQKISLQDHLDK |
| | | cleavage occurs before | AKKDITFYMPVDNLGMAVIDWEEWRPT |
| | | F38 amino acid residue | WARNWKPKDVYKNRSIELVQQQNVQLS |
| | | at N-terminus of PH20, | LTEATEKAKQEFEKAGKDFLVETIKLGKL |
| | | and cleavage occurs | LRPNHLWGYYLFPDCYNHHYKKPGYNG |
| | | after F468 amino acid | SCFNVEIKRNDDLSWLWNESTALYPSIYL |
| | | residue at C-terminus | NTQQSPVAATLYVRNRVREAIRVSKIPDA |
| | | of PH20. | KSPLPVFAYTRIVFTDQALKFLSQDELVY |
| | | | TFGETVALGASGIVIWGSWENTRTKESCQ |
| | | | AIKEYMDTTLNPYIINVTLAAKMCSQVLC |
| | | | QEQGVCIRKNWNSSDYLHLNPDNFAIQLE |
| | | | KGGKFTVRGKPTLEDLEQFSEKFYCSCYS |
| | | | TLSCKEKADVKDTDAVDVCIADGVCIDA |
| | | | F |
| HM158 | 243 | One amino acid residue | FRAPPVIPNVPFLWAWNAPSEFCLGKFDE |
| | | L313A is substituted | PLDMSLFSFIGSPRINATGQGVTIFYVDRL |
| | | from SEQ ID NO: 3, | GYYPYIDSITGVTVNGGIPQKISLQDHLDK |
| | | cleavage occurs before | AKKDITFYMPVDNLGMAVIDWEEWRPT |
| | | F38 amino acid residue | WARNWKPKDVYKNRSIELVQQQNVQLS |
| | | at N-terminus of PH20, | LTEATEKAKQEFEKAGKDFLVETIKLGKL |
| | | and cleavage occurs | LRPNHLWGYYLFPDCYNHHYKKPGYNG |
| | | after F468 amino acid | SCFNVEIKRNDDLSWLWNESTALYPSIYL |
| | | residue at C-terminus | NTQQSPVAATLYVRNRVREAIRVSKIPDA |
| | | of PH20. | KSPLPVFAYTRIVFTDQVAKFLSQDELVY |
| | | | TFGETVALGASGIVIWGSWENTRTKESCQ |
| | | | AIKEYMDTTLNPYIINVTLAAKMCSQVLC |
| | | | QEQGVCIRKNWNSSDYLHLNPDNFAIQLE |
| | | | KGGKFTVRGKPTLEDLEQFSEKFYCSCYS |
| | | | TLSCKEKADVKDTDAVDVCIADGVCIDA |
| | | | F |
| HM159 | 244 | One amino acid residue | FRAPPVIPNVPFLWAWNAPSEFCLGKFDE |
| | | K314A is substituted | PLDMSLFSFIGSPRINATGQGVTIFYVDRL |
| | | from SEQ ID NO: 3, | GYYPYIDSITGVTVNGGIPQKISLQDHLDK |
| | | cleavage occurs before | AKKDITFYMPVDNLGMAVIDWEEWRPT |
| | | F38 amino acid residue | WARNWKPKDVYKNRSIELVQQQNVQLS |
| | | at N-terminus of PH20, | LTEATEKAKQEFEKAGKDFLVETIKLGKL |
| | | and cleavage occurs | LRPNHLWGYYLFPDCYNHHYKKPGYNG |
| | | after F468 amino acid | SCFNVEIKRNDDLSWLWNESTALYPSIYL |
| | | residue at C-terminus | NTQQSPVAATLYVRNRVREAIRVSKIPDA |
| | | of PH20. | KSPLPVFAYTRIVFTDQVLAFLSQDELVY |
| | | | TFGETVALGASGIVIWGSWENTRTKESCQ |
| | | | AIKEYMDTTLNPYIINVTLAAKMCSQVLC |
| | | | QEQGVCIRKNWNSSDYLHLNPDNFAIQLE |
| | | | KGGKFTVRGKPTLEDLEQFSEKFYCSCYS |
| | | | TLSCKEKADVKDTDAVDVCIADGVCIDA |
| | | | F |
| HM160 | 245 | One amino acid residue | FRAPPVIPNVPFLWAWNAPSEFCLGKFDE |
| | | N266A is substituted | PLDMSLFSFIGSPRINATGQGVTIFYVDRL |
| | | from SEQ ID NO: 3, | GYYPYIDSITGVTVNGGIPQKISLQDHLDK |
| | | cleavage occurs before | AKKDITFYMPVDNLGMAVIDWEEWRPT |
| | | F38 amino acid residue | WARNWKPKDVYKNRSIELVQQQNVQLS |
| | | at N-terminus of PH20, | LTEATEKAKQEFEKAGKDFLVETIKLGKL |
| | | and cleavage occurs | LRPNHLWGYYLFPDCYNHHYKKPGYNG |
| | | after F468 amino acid | SCFNVEIKRNDDLSWLWNESTALYPSIYL |
| | | residue at C-terminus | ATQQSPVAATLYVRNRVREAIRVSKIPDA |
| | | of PH20. | KSPLPVFAYTRIVFTDQVLKFLSQDELVY |
| | | | TFGETVALGASGIVIWGSWENTRTKESCQ |
| | | | AIKEYMDTTLNPYIINVTLAAKMCSQVLC |
| | | | QEQGVCIRKNWNSSDYLHLNPDNFAIQLE |
| | | | KGGKFTVRGKPTLEDLEQFSEKFYCSCYS |
| | | | TLSCKEKADVKDTDAVDVCIADGVCIDA |
| | | | F |
| HM161 | 246 | One amino acid residue | FRAPPVIPNVPFLWAWNAPSEFCLGKFDE |
| | | T267A is substituted | PLDMSLFSFIGSPRINATGQGVTIFYVDRL |
| | | from SEQ ID NO: 3, | GYYPYIDSITGVTVNGGIPQKISLQDHLDK |
| | | cleavage occurs before | AKKDITFYMPVDNLGMAVIDWEEWRPT |
| | | F38 amino acid residue | WARNWKPKDVYKNRSIELVQQQNVQLS |
| | | at N-terminus of PH20, | LTEATEKAKQEFEKAGKDFLVETIKLGKL |
| | | and cleavage occurs | LRPNHLWGYYLFPDCYNHHYKKPGYNG |
| | | after F468 amino acid | SCFNVEIKRNDDLSWLWNESTALYPSIYL |
| | | residue at C-terminus | NAQQSPVAATLYVRNRVREAIRVSKIPDA |
| | | of PH20. | KSPLPVFAYTRIVFTDQVLKFLSQDELVY |
| | | | TFGETVALGASGIVIWGSWENTRTKESCQ |
| | | | AIKEYMDTTLNPYIINVTLAAKMCSQVLC |
| | | | QEQGVCIRKNWNSSDYLHLNPDNFAIQLE |
| | | | KGGKFTVRGKPTLEDLEQFSEKFYCSCYS |
| | | | TLSCKEKADVKDTDAVDVCIADGVCIDA |
| | | | F |
| HM162 | 247 | One amino acid residue | FRAPPVIPNVPFLWAWNAPSEFCLGKFDE |
| | | Q268A is substituted | PLDMSLFSFIGSPRINATGQGVTIFYVDRL |
| | | from SEQ ID NO: 3, | GYYPYIDSITGVTVNGGIPQKISLQDHLDK |
| | | cleavage occurs before | AKKDITFYMPVDNLGMAVIDWEEWRPT |
| | | F38 amino acid residue | WARNWKPKDVYKNRSIELVQQQNVQLS |
| | | at N-terminus of PH20, | LTEATEKAKQEFEKAGKDFLVETIKLGKL |
| | | and cleavage occurs | LRPNHLWGYYLFPDCYNHHYKKPGYNG |
| | | after F468 amino acid | SCFNVEIKRNDDLSWLWNESTALYPSIYL |
| | | residue at C-terminus | NTAQSPVAATLYVRNRVREAIRVSKIPDA |
| | | of PH20. | KSPLPVFAYTRIVFTDQVLKFLSQDELVY |
| | | | TFGETVALGASGIVIWGSWENTRTKESCQ |
| | | | AIKEYMDTTLNPYIINVTLAAKMCSQVLC |
| | | | QEQGVCIRKNWNSSDYLHLNPDNFAIQLE |
| | | | KGGKFTVRGKPTLEDLEQFSEKFYCSCYS |
| | | | TLSCKEKADVKDTDAVDVCIADGVCIDA |
| | | | F |
| HM163 | 248 | One amino acid residue | FRAPPVIPNVPFLWAWNAPSEFCLGKFDE |
| | | Q269A is substituted | PLDMSLFSFIGSPRINATGQGVTIFYVDRL |
| | | from SEQ ID NO: 3, | GYYPYIDSITGVTVNGGIPQKISLQDHLDK |
| | | cleavage occurs before | AKKDITFYMPVDNLGMAVIDWEEWRPT |
| | | F38 amino acid residue | WARNWKPKDVYKNRSIELVQQQNVQLS |
| | | at N-terminus of PH20, | LTEATEKAKQEFEKAGKDFLVETIKLGKL |
| | | and cleavage occurs | LRPNHLWGYYLFPDCYNHHYKKPGYNG |
| | | after F468 amino acid | SCFNVEIKRNDDLSWLWNESTALYPSIYL |
| | | residue at C-terminus | NTQASPVAATLYVRNRVREAIRVSKIPDA |
| | | of PH20. | KSPLPVFAYTRIVFTDQVLKFLSQDELVY |
| | | | TFGETVALGASGIVIWGSWENTRTKESCQ |
| | | | AIKEYMDTTLNPYIINVTLAAKMCSQVLC |
| | | | QEQGVCIRKNWNSSDYLHLNPDNFAIQLE |
| | | | KGGKFTVRGKPTLEDLEQFSEKFYCSCYS |
| | | | TLSCKEKADVKDTDAVDVCIADGVCIDA |
| | | | F |
| HM164 | 249 | One amino acid residue | FRAPPVIPNVPFLWAWNAPSEFCLGKFDE |
| | | P271A is substituted | PLDMSLFSFIGSPRINATGQGVTIFYVDRL |
| | | from SEQ ID NO: 3, | GYYPYIDSITGVTVNGGIPQKISLQDHLDK |
| | | cleavage occurs before | AKKDITFYMPVDNLGMAVIDWEEWRPT |
| | | F38 amino acid residue | WARNWKPKDVYKNRSIELVQQQNVQLS |
| | | at N-terminus of PH20, | LTEATEKAKQEFEKAGKDFLVETIKLGKL |
| | | and cleavage occurs | LRPNHLWGYYLFPDCYNHHYKKPGYNG |
| | | after F468 amino acid | SCFNVEIKRNDDLSWLWNESTALYPSIYL |
| | | residue at C-terminus | NTQQSAVAATLYVRNRVREAIRVSKIPDA |
| | | of PH20. | KSPLPVFAYTRIVFTDQVLKFLSQDELVY |
| | | | TFGETVALGASGIVIWGSWENTRTKESCQ |
| | | | AIKEYMDTTLNPYIINVTLAAKMCSQVLC |
| | | | QEQGVCIRKNWNSSDYLHLNPDNFAIQLE |
| | | | KGGKFTVRGKPTLEDLEQFSEKFYCSCYS |
| | | | TLSCKEKADVKDTDAVDVCIADGVCIDA |
| | | | F |
| HM165 | 250 | One amino acid residue | FRAPPVIPNVPFLWAWNAPSEFCLGKFDE |
| | | V272A is substituted | PLDMSLFSFIGSPRINATGQGVTIFYVDRL |
| | | from SEQ ID NO: 3, | GYYPYIDSITGVTVNGGIPQKISLQDHLDK |
| | | cleavage occurs before | AKKDITFYMPVDNLGMAVIDWEEWRPT |
| | | F38 amino acid residue | WARNWKPKDVYKNRSIELVQQQNVQLS |
| | | at N-terminus of PH20, | LTEATEKAKQEFEKAGKDFLVETIKLGKL |
| | | and cleavage occurs | LRPNHLWGYYLFPDCYNHHYKKPGYNG |
| | | after F468 amino acid | SCFNVEIKRNDDLSWLWNESTALYPSIYL |
| | | residue at C-terminus | NTQQSPAAATLYVRNRVREAIRVSKIPDA |
| | | of PH20. | KSPLPVFAYTRIVFTDQVLKFLSQDELVY |
| | | | TFGETVALGASGIVIWGSWENTRTKESCQ |
| | | | AIKEYMDTTLNPYIINVTLAAKMCSQVLC |
| | | | QEQGVCIRKNWNSSDYLHLNPDNFAIQLE |
| | | | KGGKFTVRGKPTLEDLEQFSEKFYCSCYS |
| | | | TLSCKEKADVKDTDAVDVCIADGVCIDA |
| | | | F |
| HM166 | 251 | One amino acid residue | FRAPPVIPNVPFLWAWNAPSEFCLGKFDE |
| | | I102A is substituted | PLDMSLFSFIGSPRINATGQGVTIFYVDRL |
| | | from SEQ ID NO: 3, | GYYPYADSITGVTVNGGIPQKISLQDHLD |
| | | cleavage occurs before | KAKKDITFYMPVDNLGMAVIDWEEWRP |
| | | F38 amino acid residue | TWARNWKPKDVYKNRSIELVQQQNVQL |
| | | at N-terminus of PH20, | SLTEATEKAKQEFEKAGKDFLVETIKLGK |
| | | and cleavage occurs | LLRPNHLWGYYLFPDCYNHHYKKPGYN |
| | | after F468 amino acid | GSCFNVEIKRNDDLSWLWNESTALYPSIY |
| | | residue at C-terminus | LNTQQSPVAATLYVRNRVREAIRVSKIPD |
| | | of PH20. | AKSPLPVFAYTRIVFTDQVLKFLSQDELV |
| | | | YTFGETVALGASGIVIWGSWENTRTKESC |
| | | | QAIKEYMDTTLNPYIINVTLAAKMCSQVL |
| | | | CQEQGVCIRKNWNSSDYLHLNPDNFAIQ |
| | | | LEKGGKFTVRGKPTLEDLEQFSEKFYCSC |
| | | | YSTLSCKEKADVKDTDAVDVCIADGVCI |
| | | | DAF |
| HM167 | 252 | One amino acid residue | FRAPPVIPNVPFLWAWNAPSEFCLGKFDE |
| | | D103A is substituted | PLDMSLFSFIGSPRINATGQGVTIFYVDRL |
| | | from SEQ ID NO: 3, | GYYPYIASITGVTVNGGIPQKISLQDHLDK |
| | | cleavage occurs before | AKKDITFYMPVDNLGMAVIDWEEWRPT |
| | | F38 amino acid residue | WARNWKPKDVYKNRSIELVQQQNVQLS |
| | | at N-terminus of PH20, | LTEATEKAKQEFEKAGKDFLVETIKLGKL |
| | | and cleavage occurs | LRPNHLWGYYLFPDCYNHHYKKPGYNG |
| | | after F468 amino acid | SCFNVEIKRNDDLSWLWNESTALYPSIYL |
| | | residue at C-terminus | NTQQSPVAATLYVRNRVREAIRVSKIPDA |
| | | of PH20. | KSPLPVFAYTRIVFTDQVLKFLSQDELVY |
| | | | TFGETVALGASGIVIWGSWENTRTKESCQ |
| | | | AIKEYMDTTLNPYIINVTLAAKMCSQVLC |
| | | | QEQGVCIRKNWNSSDYLHLNPDNFAIQLE |
| | | | KGGKFTVRGKPTLEDLEQFSEKFYCSCYS |
| | | | TLSCKEKADVKDTDAVDVCIADGVCIDA |
| | | | F |
| HM168 | 253 | One amino acid residue | FRAPPVIPNVPFLWAWNAPSEFCLGKFDE |
| | | S104A is substituted | PLDMSLFSFIGSPRINATGQGVTIFYVDRL |
| | | from SEQ ID NO: 3, | GYYPYIDAITGVTVNGGIPQKISLQDHLD |
| | | cleavage occurs before | KAKKDITFYMPVDNLGMAVIDWEEWRP |
| | | F38 amino acid residue | TWARNWKPKDVYKNRSIELVQQQNVQL |
| | | at N-terminus of PH20, | SLTEATEKAKQEFEKAGKDFLVETIKLGK |
| | | and cleavage occurs | LLRPNHLWGYYLFPDCYNHHYKKPGYN |
| | | after F468 amino acid | GSCFNVEIKRNDDLSWLWNESTALYPSIY |
| | | residue at C-terminus | LNTQQSPVAATLYVRNRVREAIRVSKIPD |
| | | of PH20. | AKSPLPVFAYTRIVFTDQVLKFLSQDELV |
| | | | YTFGETVALGASGIVIWGSWENTRTKESC |
| | | | QAIKEYMDTTLNPYIINVTLAAKMCSQVL |
| | | | CQEQGVCIRKNWNSSDYLHLNPDNFAIQ |
| | | | LEKGGKFTVRGKPTLEDLEQFSEKFYCSC |
| | | | YSTLSCKEKADVKDTDAVDVCIADGVCI |
| | | | DAF |
| HM169 | 254 | One amino acid residue | FRAPPVIPNVPFLWAWNAPSEFCLGKFDE |
| | | I105A is substituted | PLDMSLFSFIGSPRINATGQGVTIFYVDRL |
| | | from SEQ ID NO: 3, | GYYPYIDSATGVTVNGGIPQKISLQDHLD |
| | | cleavage occurs before | KAKKDITFYMPVDNLGMAVIDWEEWRP |
| | | F38 amino acid residue | TWARNWKPKDVYKNRSIELVQQQNVQL |
| | | at N-terminus of PH20, | SLTEATEKAKQEFEKAGKDFLVETIKLGK |
| | | and cleavage occurs | LLRPNHLWGYYLFPDCYNHHYKKPGYN |
| | | after F468 amino acid | GSCFNVEIKRNDDLSWLWNESTALYPSIY |
| | | residue at C-terminus | LNTQQSPVAATLYVRNRVREAIRVSKIPD |
| | | of PH20. | AKSPLPVFAYTRIVFTDQVLKFLSQDELV |
| | | | YTFGETVALGASGIVIWGSWENTRTKESC |
| | | | QAIKEYMDTTLNPYIINVTLAAKMCSQVL |
| | | | CQEQGVCIRKNWNSSDYLHLNPDNFAIQ |
| | | | LEKGGKFTVRGKPTLEDLEQFSEKFYCSC |
| | | | YSTLSCKEKADVKDTDAVDVCIADGVCI |
| | | | DAF |
| HM170 | 255 | One amino acid residue | FRAPPVIPNVPFLWAWNAPSEFCLGKFDE |
| | | T132A is substituted | PLDMSLFSFIGSPRINATGQGVTIFYVDRL |
| | | from SEQ ID NO: 3, | GYYPYIDSITGVTVNGGIPQKISLQDHLDK |
| | | cleavage occurs before | AKKDIAFYMPVDNLGMAVIDWEEWRPT |
| | | F38 amino acid residue | WARNWKPKDVYKNRSIELVQQQNVQLS |
| | | at N-terminus of PH20, | LTEATEKAKQEFEKAGKDFLVETIKLGKL |
| | | and cleavage occurs | LRPNHLWGYYLFPDCYNHHYKKPGYNG |
| | | after F468 amino acid | SCFNVEIKRNDDLSWLWNESTALYPSIYL |
| | | residue at C-terminus | NTQQSPVAATLYVRNRVREAIRVSKIPDA |
| | | of PH20. | KSPLPVFAYTRIVFTDQVLKFLSQDELVY |
| | | | TFGETVALGASGIVIWGSWENTRTKESCQ |
| | | | AIKEYMDTTLNPYIINVTLAAKMCSQVLC |
| | | | QEQGVCIRKNWNSSDYLHLNPDNFAIQLE |
| | | | KGGKFTVRGKPTLEDLEQFSEKFYCSCYS |
| | | | TLSCKEKADVKDTDAVDVCIADGVCIDA |
| | | | F |
| HM171 | 256 | One amino acid residue | FRAPPVIPNVPFLWAWNAPSEFCLGKFDE |
| | | F133A is substituted | PLDMSLFSFIGSPRINATGQGVTIFYVDRL |
| | | from SEQ ID NO: 3, | GYYPYIDSITGVTVNGGIPQKISLQDHLDK |
| | | cleavage occurs before | AKKDITAYMPVDNLGMAVIDWEEWRPT |
| | | F38 amino acid residue | WARNWKPKDVYKNRSIELVQQQNVQLS |
| | | at N-terminus of PH20, | LTEATEKAKQEFEKAGKDFLVETIKLGKL |
| | | and cleavage occurs | LRPNHLWGYYLFPDCYNHHYKKPGYNG |
| | | after F468 amino acid | SCFNVEIKRNDDLSWLWNESTALYPSIYL |
| | | residue at C-terminus | NTQQSPVAATLYVRNRVREAIRVSKIPDA |
| | | of PH20. | KSPLPVFAYTRIVFTDQVLKFLSQDELVY |
| | | | TFGETVALGASGIVIWGSWENTRTKESCQ |
| | | | AIKEYMDTTLNPYIINVTLAAKMCSQVLC |
| | | | QEQGVCIRKNWNSSDYLHLNPDNFAIQLE |
| | | | KGGKFTVRGKPTLEDLEQFSEKFYCSCYS |
| | | | TLSCKEKADVKDTDAVDVCIADGVCIDA |
| | | | F |
| HM172 | 257 | One amino acid residue | FRAPPVIPNVPFLWAWNAPSEFCLGKFDE |
| | | Y134A is substituted | PLDMSLFSFIGSPRINATGQGVTIFYVDRL |
| | | from SEQ ID NO: 3, | GYYPYIDSITGVTVNGGIPQKISLQDHLDK |
| | | cleavage occurs before | AKKDITFAMPVDNLGMAVIDWEEWRPT |
| | | F38 amino acid residue | WARNWKPKDVYKNRSIELVQQQNVQLS |
| | | at N-terminus of PH20, | LTEATEKAKQEFEKAGKDFLVETIKLGKL |
| | | and cleavage occurs | LRPNHLWGYYLFPDCYNHHYKKPGYNG |
| | | after F468 amino acid | SCFNVEIKRNDDLSWLWNESTALYPSIYL |
| | | residue at C-terminus | NTQQSPVAATLYVRNRVREAIRVSKIPDA |
| | | of PH20. | KSPLPVFAYTRIVFTDQVLKFLSQDELVY |
| | | | TFGETVALGASGIVIWGSWENTRTKESCQ |
| | | | AIKEYMDTTLNPYIINVTLAAKMCSQVLC |
| | | | QEQGVCIRKNWNSSDYLHLNPDNFAIQLE |
| | | | KGGKFTVRGKPTLEDLEQFSEKFYCSCYS |
| | | | TLSCKEKADVKDTDAVDVCIADGVCIDA |
| | | | F |
| HM173 | 258 | One amino acid residue | FRAPPVIPNVPFLWAWNAPSEFCLGKFDE |
| | | V241A is substituted | PLDMSLFSFIGSPRINATGQGVTIFYVDRL |
| | | from SEQ ID NO: 3, | GYYPYIDSITGVTVNGGIPQKISLQDHLDK |
| | | cleavage occurs before | AKKDITFYMPVDNLGMAVIDWEEWRPT |
| | | F38 amino acid residue | WARNWKPKDVYKNRSIELVQQQNVQLS |
| | | at N-terminus of PH20, | LTEATEKAKQEFEKAGKDFLVETIKLGKL |
| | | and cleavage occurs | LRPNHLWGYYLFPDCYNHHYKKPGYNG |
| | | after F468 amino acid | SCFNAEIKRNDDLSWLWNESTALYPSIYL |
| | | residue at C-terminus | NTQQSPVAATLYVRNRVREAIRVSKIPDA |
| | | of PH20. | KSPLPVFAYTRIVFTDQVLKFLSQDELVY |
| | | | TFGETVALGASGIVIWGSWENTRTKESCQ |
| | | | AIKEYMDTTLNPYIINVTLAAKMCSQVLC |
| | | | QEQGVCIRKNWNSSDYLHLNPDNFAIQLE |
| | | | KGGKFTVRGKPTLEDLEQFSEKFYCSCYS |
| | | | TLSCKEKADVKDTDAVDVCIADGVCIDA |
| | | | F |
| HM174 | 259 | One amino acid residue | FRAPPVIPNVPFLWAWNAPSEFCLGKFDE |
| | | E242A is substituted | PLDMSLFSFIGSPRINATGQGVTIFYVDRL |
| | | from SEQ ID NO: 3, | GYYPYIDSITGVTVNGGIPQKISLQDHLDK |
| | | cleavage occurs before | AKKDITFYMPVDNLGMAVIDWEEWRPT |
| | | F38 amino acid residue | WARNWKPKDVYKNRSIELVQQQNVQLS |
| | | at N-terminus of PH20, | LTEATEKAKQEFEKAGKDFLVETIKLGKL |
| | | and cleavage occurs | LRPNHLWGYYLFPDCYNHHYKKPGYNG |
| | | after F468 amino acid | SCFNVAIKRNDDLSWLWNESTALYPSIYL |
| | | residue at C-terminus | NTQQSPVAATLYVRNRVREAIRVSKIPDA |
| | | of PH20. | KSPLPVFAYTRIVFTDQVLKFLSQDELVY |
| | | | TFGETVALGASGIVIWGSWENTRTKESCQ |
| | | | AIKEYMDTTLNPYIINVTLAAKMCSQVLC |
| | | | QEQGVCIRKNWNSSDYLHLNPDNFAIQLE |
| | | | KGGKFTVRGKPTLEDLEQFSEKFYCSCYS |
| | | | TLSCKEKADVKDTDAVDVCIADGVCIDA |
| | | | F |
| HM175 | 260 | One amino acid residue | FRAPPVIPNVPFLWAWNAPSEFCLGKFDE |
| | | I243 A is substituted | PLDMSLFSFIGSPRINATGQGVTIFYVDRL |
| | | from SEQ ID NO: 3, | GYYPYIDSITGVTVNGGIPQKISLQDHLDK |
| | | cleavage occurs before | AKKDITFYMPVDNLGMAVIDWEEWRPT |
| | | F38 amino acid residue | WARNWKPKDVYKNRSIELVQQQNVQLS |
| | | at N-terminus of PH20, | LTEATEKAKQEFEKAGKDFLVETIKLGKL |
| | | and cleavage occurs | LRPNHLWGYYLFPDCYNHHYKKPGYNG |
| | | after F468 amino acid | SCFNVEAKRNDDLSWLWNESTALYPSIY |
| | | residue at C-terminus | LNTQQSPVAATLYVRNRVREAIRVSKIPD |
| | | of PH20. | AKSPLPVFAYTRIVFTDQVLKFLSQDELV |
| | | | YTFGETVALGASGIVIWGSWENTRTKESC |
| | | | QAIKEYMDTTLNPYIINVTLAAKMCSQVL |
| | | | CQEQGVCIRKNWNSSDYLHLNPDNFAIQ |
| | | | LEKGGKFTVRGKPTLEDLEQFSEKFYCSC |
| | | | YSTLSCKEKADVKDTDAVDVCIADGVCI |
| | | | DAF |
| HM176 | 261 | One amino acid residue | FRAPPVIPNVPFLWAWNAPSEFCLGKFDE |
| | | K244A is substituted | PLDMSLFSFIGSPRINATGQGVTIFYVDRL |
| | | from SEQ ID NO: 3, | GYYPYIDSITGVTVNGGIPQKISLQDHLDK |
| | | cleavage occurs before | AKKDITFYMPVDNLGMAVIDWEEWRPT |
| | | F38 amino acid residue | WARNWKPKDVYKNRSIELVQQQNVQLS |
| | | at N-terminus of PH20, | LTEATEKAKQEFEKAGKDFLVETIKLGKL |
| | | and cleavage occurs | LRPNHLWGYYLFPDCYNHHYKKPGYNG |
| | | after F468 amino acid | SCFNVEIARNDDLSWLWNESTALYPSIYL |
| | | residue at C-terminus | NTQQSPVAATLYVRNRVREAIRVSKIPDA |
| | | of PH20. | KSPLPVFAYTRIVFTDQVLKFLSQDELVY |
| | | | TFGETVALGASGIVIWGSWENTRTKESCQ |
| | | | AIKEYMDTTLNPYIINVTLAAKMCSQVLC |
| | | | QEQGVCIRKNWNSSDYLHLNPDNFAIQLE |
| | | | KGGKFTVRGKPTLEDLEQFSEKFYCSCYS |
| | | | TLSCKEKADVKDTDAVDVCIADGVCIDA |
| | | | F |
| HM177 | 262 | One amino acid residue | FRAPPVIPNVPFLWAWNAPSEFCLGKFDE |
| | | L179A is substituted | PLDMSLFSFIGSPRINATGQGVTIFYVDRL |
| | | from SEQ ID NO: 3, | GYYPYIDSITGVTVNGGIPQKISLQDHLDK |
| | | cleavage occurs before | AKKDITFYMPVDNLGMAVIDWEEWRPT |
| | | F38 amino acid residue | WARNWKPKDVYKNRSIELVQQQNVQAS |
| | | at N-terminus of PH20, | LTEATEKAKQEFEKAGKDFLVETIKLGKL |
| | | and cleavage occurs | LRPNHLWGYYLFPDCYNHHYKKPGYNG |
| | | after F468 amino acid | SCFNVEIKRNDDLSWLWNESTALYPSIYL |
| | | residue at C-terminus | NTQQSPVAATLYVRNRVREAIRVSKIPDA |
| | | of PH20. | KSPLPVFAYTRIVFTDQVLKFLSQDELVY |
| | | | TFGETVALGASGIVIWGSWENTRTKESCQ |
| | | | AIKEYMDTTLNPYIINVTLAAKMCSQVLC |
| | | | QEQGVCIRKNWNSSDYLHLNPDNFAIQLE |
| | | | KGGKFTVRGKPTLEDLEQFSEKFYCSCYS |
| | | | TLSCKEKADVKDTDAVDVCIADGVCIDA |
| | | | F |
| HM178 | 263 | One amino acid residue | FRAPPVIPNVPFLWAWNAPSEFCLGKFDE |
| | | S180A is substituted | PLDMSLFSFIGSPRINATGQGVTIFYVDRL |
| | | from SEQ ID NO: 3, | GYYPYIDSITGVTVNGGIPQKISLQDHLDK |
| | | cleavage occurs before | AKKDITFYMPVDNLGMAVIDWEEWRPT |
| | | F38 amino acid residue | WARNWKPKDVYKNRSIELVQQQNVQLA |
| | | at N-terminus of PH20, | LTEATEKAKQEFEKAGKDFLVETIKLGKL |
| | | and cleavage occurs | LRPNHLWGYYLFPDCYNHHYKKPGYNG |
| | | after F468 amino acid | SCFNVEIKRNDDLSWLWNESTALYPSIYL |
| | | residue at C-terminus | NTQQSPVAATLYVRNRVREAIRVSKIPDA |
| | | of PH20. | KSPLPVFAYTRIVFTDQVLKFLSQDELVY |
| | | | TFGETVALGASGIVIWGSWENTRTKESCQ |
| | | | AIKEYMDTTLNPYIINVTLAAKMCSQVLC |
| | | | QEQGVCIRKNWNSSDYLHLNPDNFAIQLE |
| | | | KGGKFTVRGKPTLEDLEQFSEKFYCSCYS |
| | | | TLSCKEKADVKDTDAVDVCIADGVCIDA |
| | | | F |
| HM179 | 264 | One amino acid residue | FRAPPVIPNVPFLWAWNAPSEFCLGKFDE |
| | | L181A is substituted | PLDMSLFSFIGSPRINATGQGVTIFYVDRL |
| | | from SEQ ID NO: 3, | GYYPYIDSITGVTVNGGIPQKISLQDHLDK |
| | | cleavage occurs before | AKKDITFYMPVDNLGMAVIDWEEWRPT |
| | | F38 amino acid residue | WARNWKPKDVYKNRSIELVQQQNVQLS |
| | | at N-terminus of PH20, | ATEATEKAKQEFEKAGKDFLVETIKLGKL |
| | | and cleavage occurs | LRPNHLWGYYLFPDCYNHHYKKPGYNG |
| | | after F468 amino acid | SCFNVEIKRNDDLSWLWNESTALYPSIYL |
| | | residue at C-terminus | NTQQSPVAATLYVRNRVREAIRVSKIPDA |
| | | of PH20. | KSPLPVFAYTRIVFTDQVLKFLSQDELVY |
| | | | TFGETVALGASGIVIWGSWENTRTKESCQ |
| | | | AIKEYMDTTLNPYIINVTLAAKMCSQVLC |
| | | | QEQGVCIRKNWNSSDYLHLNPDNFAIQLE |
| | | | KGGKFTVRGKPTLEDLEQFSEKFYCSCYS |
| | | | TLSCKEKADVKDTDAVDVCIADGVCIDA |
| | | | F |
| HM180 | 265 | One amino acid residue | FRAPPVIPNVPFLWAWNAPSEFCLGKFDE |
| | | T182A is substituted | PLDMSLFSFIGSPRINATGQGVTIFYVDRL |
| | | from SEQ ID NO: 3, | GYYPYIDSITGVTVNGGIPQKISLQDHLDK |
| | | cleavage occurs before | AKKDITFYMPVDNLGMAVIDWEEWRPT |
| | | F38 amino acid residue | WARNWKPKDVYKNRSIELVQQQNVQLS |
| | | at N-terminus of PH20, | LAEATEKAKQEFEKAGKDFLVETIKLGKL |
| | | and cleavage occurs | LRPNHLWGYYLFPDCYNHHYKKPGYNG |
| | | after F468 amino acid | SCFNVEIKRNDDLSWLWNESTALYPSIYL |
| | | residue at C-terminus | NTQQSPVAATLYVRNRVREAIRVSKIPDA |
| | | of PH20. | KSPLPVFAYTRIVFTDQVLKFLSQDELVY |
| | | | TFGETVALGASGIVIWGSWENTRTKESCQ |
| | | | AIKEYMDTTLNPYIINVTLAAKMCSQVLC |
| | | | QEQGVCIRKNWNSSDYLHLNPDNFAIQLE |
| | | | KGGKFTVRGKPTLEDLEQFSEKFYCSCYS |
| | | | TLSCKEKADVKDTDAVDVCIADGVCIDA |
| | | | F |
| HM181 | 266 | One amino acid residue | FRAPPVIPNVPFLWAWNAPSEFCLGKFDE |
| | | T185A is substituted | PLDMSLFSFIGSPRINATGQGVTIFYVDRL |
| | | from SEQ ID NO: 3, | GYYPYIDSITGVTVNGGIPQKISLQDHLDK |
| | | cleavage occurs before | AKKDITFYMPVDNLGMAVIDWEEWRPT |
| | | F38 amino acid residue | WARNWKPKDVYKNRSIELVQQQNVQLS |
| | | at N-terminus of PH20, | LTEAAEKAKQEFEKAGKDFLVETIKLGKL |
| | | and cleavage occurs | LRPNHLWGYYLFPDCYNHHYKKPGYNG |
| | | after F468 amino acid | SCFNVEIKRNDDLSWLWNESTALYPSIYL |
| | | residue at C-terminus | NTQQSPVAATLYVRNRVREAIRVSKIPDA |
| | | of PH20. | KSPLPVFAYTRIVFTDQVLKFLSQDELVY |
| | | | TFGETVALGASGIVIWGSWENTRTKESCQ |
| | | | AIKEYMDTTLNPYIINVTLAAKMCSQVLC |
| | | | QEQGVCIRKNWNSSDYLHLNPDNFAIQLE |
| | | | KGGKFTVRGKPTLEDLEQFSEKFYCSCYS |
| | | | TLSCKEKADVKDTDAVDVCIADGVCIDA |
| | | | F |
| HM182 | 267 | One amino acid residue | FRAPPVIPNVPFLWAWNAPSEFCLGKFDE |
| | | E186A is substituted | PLDMSLFSFIGSPRINATGQGVTIFYVDRL |
| | | from SEQ ID NO: 3, | GYYPYIDSITGVTVNGGIPQKISLQDHLDK |
| | | cleavage occurs before | AKKDITFYMPVDNLGMAVIDWEEWRPT |
| | | F38 amino acid residue | WARNWKPKDVYKNRSIELVQQQNVQLS |
| | | at N-terminus of PH20, | LTEATAKAKQEFEKAGKDFLVETIKLGKL |
| | | and cleavage occurs | LRPNHLWGYYLFPDCYNHHYKKPGYNG |
| | | after F468 amino acid | SCFNVEIKRNDDLSWLWNESTALYPSIYL |
| | | residue at C-terminus | NTQQSPVAATLYVRNRVREAIRVSKIPDA |
| | | of PH20. | KSPLPVFAYTRIVFTDQVLKFLSQDELVY |
| | | | TFGETVALGASGIVIWGSWENTRTKESCQ |
| | | | AIKEYMDTTLNPYIINVTLAAKMCSQVLC |
| | | | QEQGVCIRKNWNSSDYLHLNPDNFAIQLE |
| | | | KGGKFTVRGKPTLEDLEQFSEKFYCSCYS |
| | | | TLSCKEKADVKDTDAVDVCIADGVCIDA |
| | | | F |
| HM183 | 268 | One amino acid residue | FRAPPVIPNVPFLWAWNAPSEFCLGKFDE |
| | | K187A is substituted | PLDMSLFSFIGSPRINATGQGVTIFYVDRL |
| | | from SEQ ID NO: 3, | GYYPYIDSITGVTVNGGIPQKISLQDHLDK |
| | | cleavage occurs before | AKKDITFYMPVDNLGMAVIDWEEWRPT |
| | | F38 amino acid residue | WARNWKPKDVYKNRSIELVQQQNVQLS |
| | | at N-terminus of PH20, | LTEATEAAKQEFEKAGKDFLVETIKLGKL |
| | | and cleavage occurs | LRPNHLWGYYLFPDCYNHHYKKPGYNG |
| | | after F468 amino acid | SCFNVEIKRNDDLSWLWNESTALYPSIYL |
| | | residue at C-terminus | NTQQSPVAATLYVRNRVREAIRVSKIPDA |
| | | of PH20. | KSPLPVFAYTRIVFTDQVLKFLSQDELVY |
| | | | TFGETVALGASGIVIWGSWENTRTKESCQ |
| | | | AIKEYMDTTLNPYIINVTLAAKMCSQVLC |
| | | | QEQGVCIRKNWNSSDYLHLNPDNFAIQLE |
| | | | KGGKFTVRGKPTLEDLEQFSEKFYCSCYS |
| | | | TLSCKEKADVKDTDAVDVCIADGVCIDA |
| | | | F |
| HM184 | 269 | One amino acid residue | FRAPPVIPNVPFLWAWNAPSEFCLGKFDE |
| | | K290A is substituted | PLDMSLFSFIGSPRINATGQGVTIFYVDRL |
| | | from SEQ ID NO: 3, | GYYPYIDSITGVTVNGGIPQKISLQDHLDK |
| | | cleavage occurs before | AKKDITFYMPVDNLGMAVIDWEEWRPT |
| | | F38 amino acid residue | WARNWKPKDVYKNRSIELVQQQNVQLS |
| | | at N-terminus of PH20, | LTEATEKAKQEFEKAGKDFLVETIKLGKL |
| | | and cleavage occurs | LRPNHLWGYYLFPDCYNHHYKKPGYNG |
| | | after F468 amino acid | SCFNVEIKRNDDLSWLWNESTALYPSIYL |
| | | residue at C-terminus | NTQQSPVAATLYVRNRVREAIRVSAIPDA |
| | | of PH20. | KSPLPVFAYTRIVFTDQVLKFLSQDELVY |
| | | | TFGETVALGASGIVIWGSWENTRTKESCQ |
| | | | AIKEYMDTTLNPYIINVTLAAKMCSQVLC |
| | | | QEQGVCIRKNWNSSDYLHLNPDNFAIQLE |
| | | | KGGKFTVRGKPTLEDLEQFSEKFYCSCYS |
| | | | TLSCKEKADVKDTDAVDVCIADGVCIDA |
| | | | F |
| HM185 | 270 | One amino acid residue | FRAPPVIPNVPFLWAWNAPSEFCLGKFDE |
| | | I291A is substituted | PLDMSLFSFIGSPRINATGQGVTIFYVDRL |
| | | from SEQ ID NO: 3, | GYYPYIDSITGVTVNGGIPQKISLQDHLDK |
| | | cleavage occurs before | AKKDITFYMPVDNLGMAVIDWEEWRPT |
| | | F38 amino acid residue | WARNWKPKDVYKNRSIELVQQQNVQLS |
| | | at N-terminus of PH20, | LTEATEKAKQEFEKAGKDFLVETIKLGKL |
| | | and cleavage occurs | LRPNHLWGYYLFPDCYNHHYKKPGYNG |
| | | after F468 amino acid | SCFNVEIKRNDDLSWLWNESTALYPSIYL |
| | | residue at C-terminus | NTQQSPVAATLYVRNRVREAIRVSKAPD |
| | | of PH20. | AKSPLPVFAYTRIVFTDQVLKFLSQDELV |
| | | | YTFGETVALGASGIVIWGSWENTRTKESC |
| | | | QAIKEYMDTTLNPYIINVTLAAKMCSQVL |
| | | | CQEQGVCIRKNWNSSDYLHLNPDNFAIQ |
| | | | LEKGGKFTVRGKPTLEDLEQFSEKFYCSC |
| | | | YSTLSCKEKADVKDTDAVDVCIADGVCI |
| | | | DAF |
| HM186 | 271 | One amino acid residue | FRAPPVIPNVPFLWAWNAPSEFCLGKFDE |
| | | P292A is substituted | PLDMSLFSFIGSPRINATGQGVTIFYVDRL |
| | | from SEQ ID NO: 3, | GYYPYIDSITGVTVNGGIPQKISLQDHLDK |
| | | cleavage occurs before | AKKDITFYMPVDNLGMAVIDWEEWRPT |
| | | F38 amino acid residue | WARNWKPKDVYKNRSIELVQQQNVQLS |
| | | at N-terminus of PH20, | LTEATEKAKQEFEKAGKDFLVETIKLGKL |
| | | and cleavage occurs | LRPNHLWGYYLFPDCYNHHYKKPGYNG |
| | | after F468 amino acid | SCFNVEIKRNDDLSWLWNESTALYPSIYL |
| | | residue at C-terminus | NTQQSPVAATLYVRNRVREAIRVSKIADA |
| | | of PH20. | KSPLPVFAYTRIVFTDQVLKFLSQDELVY |
| | | | TFGETVALGASGIVIWGSWENTRTKESCQ |
| | | | AIKEYMDTTLNPYIINVTLAAKMCSQVLC |
| | | | QEQGVCIRKNWNSSDYLHLNPDNFAIQLE |
| | | | KGGKFTVRGKPTLEDLEQFSEKFYCSCYS |
| | | | TLSCKEKADVKDTDAVDVCIADGVCIDA |
| | | | F |
| HM190 | 272 | One amino acid residue | FRAPPVIPNVPFLWAWNAPSEFCLGKFDE |
| | | L441A is substituted | PLDMSLFSFIGSPRINATGQGVTIFYVDRL |
| | | from SEQ ID NO: 3, | GYYPYIDSITGVTVNGGIPQKISLQDHLDK |
| | | cleavage occurs before | AKKDITFYMPVDNLGMAVIDWEEWRPT |
| | | F38 amino acid residue | WARNWKPKDVYKNRSIELVQQQNVQLS |
| | | at N-terminus of PH20, | LTEATEKAKQEFEKAGKDFLVETIKLGKL |
| | | and cleavage occurs | LRPNHLWGYYLFPDCYNHHYKKPGYNG |
| | | after F468 amino acid | SCFNVEIKRNDDLSWLWNESTALYPSIYL |
| | | residue at C-terminus | NTQQSPVAATLYVRNRVREAIRVSKIPDA |
| | | of PH20. | KSPLPVFAYTRIVFTDQVLKFLSQDELVY |
| | | | TFGETVALGASGIVIWGSWENTRTKESCQ |
| | | | AIKEYMDTTLNPYIINVTLAAKMCSQVLC |
| | | | QEQGVCIRKNWNSSDYLHLNPDNFAIQLE |
| | | | KGGKFTVRGKPTLEDLEQFSEKFYCSCYS |
| | | | TASCKEKADVKDTDAVDVCIADGVCIDA |
| | | | F |
| HM191 | 273 | One amino acid residue | FRAPPVIPNVPFLWAWNAPSEFCLGKFDE |
| | | S442A is substituted | PLDMSLFSFIGSPRINATGQGVTIFYVDRL |
| | | from SEQ ID NO: 3, | GYYPYIDSITGVTVNGGIPQKISLQDHLDK |
| | | cleavage occurs before | AKKDITFYMPVDNLGMAVIDWEEWRPT |
| | | F38 amino acid residue | WARNWKPKDVYKNRSIELVQQQNVQLS |
| | | at N-terminus of PH20, | LTEATEKAKQEFEKAGKDFLVETIKLGKL |
| | | and cleavage occurs | LRPNHLWGYYLFPDCYNHHYKKPGYNG |
| | | after F468 amino acid | SCFNVEIKRNDDLSWLWNESTALYPSIYL |
| | | residue at C-terminus | NTQQSPVAATLYVRNRVREAIRVSKIPDA |
| | | of PH20. | KSPLPVFAYTRIVFTDQVLKFLSQDELVY |
| | | | TFGETVALGASGIVIWGSWENTRTKESCQ |
| | | | AIKEYMDTTLNPYIINVTLAAKMCSQVLC |
| | | | QEQGVCIRKNWNSSDYLHLNPDNFAIQLE |
| | | | KGGKFTVRGKPTLEDLEQFSEKFYCSCYS |
| | | | TLACKEKADVKDTDAVDVCIADGVCIDA |
| | | | F |
| HM192 | 274 | One amino acid residue | FRAPPVIPNVPFLWAWNAPSEFCLGKFDE |
| | | D451A is substituted | PLDMSLFSFIGSPRINATGQGVTIFYVDRL |
| | | from SEQ ID NO: 3, | GYYPYIDSITGVTVNGGIPQKISLQDHLDK |
| | | cleavage occurs before | AKKDITFYMPVDNLGMAVIDWEEWRPT |
| | | F38 amino acid residue | WARNWKPKDVYKNRSIELVQQQNVQLS |
| | | at N-terminus of PH20, | LTEATEKAKQEFEKAGKDFLVETIKLGKL |
| | | and cleavage occurs | LRPNHLWGYYLFPDCYNHHYKKPGYNG |
| | | after F468 amino acid | SCFNVEIKRNDDLSWLWNESTALYPSIYL |
| | | residue at C-terminus | NTQQSPVAATLYVRNRVREAIRVSKIPDA |
| | | of PH20. | KSPLPVFAYTRIVFTDQVLKFLSQDELVY |
| | | | TFGETVALGASGIVIWGSWENTRTKESCQ |
| | | | AIKEYMDTTLNPYIINVTLAAKMCSQVLC |
| | | | QEQGVCIRKNWNSSDYLHLNPDNFAIQLE |
| | | | KGGKFTVRGKPTLEDLEQFSEKFYCSCYS |
| | | | TLSCKEKADVKATDAVDVCIADGVCIDA |
| | | | F |
| HM193 | 275 | One amino acid residue | FRAPPVIPNVPFLWAWNAPSEFCLGKFDE |
| | | T452A is substituted | PLDMSLFSFIGSPRINATGQGVTIFYVDRL |
| | | from SEQ ID NO: 3, | GYYPYIDSITGVTVNGGIPQKISLQDHLDK |
| | | cleavage occurs before | AKKDITFYMPVDNLGMAVIDWEEWRPT |
| | | F38 amino acid residue | WARNWKPKDVYKNRSIELVQQQNVQLS |
| | | at N-terminus of PH20, | LTEATEKAKQEFEKAGKDFLVETIKLGKL |
| | | and cleavage occurs | LRPNHLWGYYLFPDCYNHHYKKPGYNG |
| | | after F468 amino acid | SCFNVEIKRNDDLSWLWNESTALYPSIYL |
| | | residue at C-terminus | NTQQSPVAATLYVRNRVREAIRVSKIPDA |
| | | of PH20. | KSPLPVFAYTRIVFTDQVLKFLSQDELVY |
| | | | TFGETVALGASGIVIWGSWENTRTKESCQ |
| | | | AIKEYMDTTLNPYIINVTLAAKMCSQVLC |
| | | | QEQGVCIRKNWNSSDYLHLNPDNFAIQLE |
| | | | KGGKFTVRGKPTLEDLEQFSEKFYCSCYS |
| | | | TLSCKEKADVKDADAVDVCIADGVCIDA |
| | | | F |
| HM194 | 276 | One amino acid residue | FRAPPVIPNVPFLWAWNAPSEFCLGKFDE |
| | | D453A is substituted | PLDMSLFSFIGSPRINATGQGVTIFYVDRL |
| | | from SEQ ID NO: 3, | GYYPYIDSITGVTVNGGIPQKISLQDHLDK |
| | | cleavage occurs before | AKKDITFYMPVDNLGMAVIDWEEWRPT |
| | | F38 amino acid residue | WARNWKPKDVYKNRSIELVQQQNVQLS |
| | | at N-terminus of PH20, | LTEATEKAKQEFEKAGKDFLVETIKLGKL |
| | | and cleavage occurs | LRPNHLWGYYLFPDCYNHHYKKPGYNG |
| | | after F468 amino acid | SCFNVEIKRNDDLSWLWNESTALYPSIYL |
| | | residue at C-terminus | NTQQSPVAATLYVRNRVREAIRVSKIPDA |
| | | of PH20. | KSPLPVFAYTRIVFTDQVLKFLSQDELVY |
| | | | TFGETVALGASGIVIWGSWENTRTKESCQ |
| | | | AIKEYMDTTLNPYIINVTLAAKMCSQVLC |
| | | | QEQGVCIRKNWNSSDYLHLNPDNFAIQLE |
| | | | KGGKFTVRGKPTLEDLEQFSEKFYCSCYS |
| | | | TLSCKEKADVKDTAAVDVCIADGVCIDA |
| | | | F |
| HM195 | 277 | One amino acid residue | FRAPPVIPNVPFLWAWNAPSEFCLGKFDE |
| | | D461A is substituted | PLDMSLFSFIGSPRINATGQGVTIFYVDRL |
| | | from SEQ ID NO: 3, | GYYPYIDSITGVTVNGGIPQKISLQDHLDK |
| | | cleavage occurs before | AKKDITFYMPVDNLGMAVIDWEEWRPT |
| | | F38 amino acid residue | WARNWKPKDVYKNRSIELVQQQNVQLS |
| | | at N-terminus of PH20, | LTEATEKAKQEFEKAGKDFLVETIKLGKL |
| | | and cleavage occurs | LRPNHLWGYYLFPDCYNHHYKKPGYNG |
| | | after F468 amino acid | SCFNVEIKRNDDLSWLWNESTALYPSIYL |
| | | residue at C-terminus | NTQQSPVAATLYVRNRVREAIRVSKIPDA |
| | | of PH20. | KSPLPVFAYTRIVFTDQVLKFLSQDELVY |
| | | | TFGETVALGASGIVIWGSWENTRTKESCQ |
| | | | AIKEYMDTTLNPYIINVTLAAKMCSQVLC |
| | | | QEQGVCIRKNWNSSDYLHLNPDNFAIQLE |
| | | | KGGKFTVRGKPTLEDLEQFSEKFYCSCYS |
| | | | TLSCKEKADVKDTDAVDVCIAAGVCIDA |
| | | | F |
| HM196 | 278 | One amino acid residue | FRAPPVIPNVPFLWAWNAPSEFCLGKFDE |
| | | G462A is substituted | PLDMSLFSFIGSPRINATGQGVTIFYVDRL |
| | | from SEQ ID NO: 3, | GYYPYIDSITGVTVNGGIPQKISLQDHLDK |
| | | cleavage occurs before | AKKDITFYMPVDNLGMAVIDWEEWRPT |
| | | F38 amino acid residue | WARNWKPKDVYKNRSIELVQQQNVQLS |
| | | at N-terminus of PH20, | LTEATEKAKQEFEKAGKDFLVETIKLGKL |
| | | and cleavage occurs | LRPNHLWGYYLFPDCYNHHYKKPGYNG |
| | | after F468 amino acid | SCFNVEIKRNDDLSWLWNESTALYPSIYL |
| | | residue at C-terminus | NTQQSPVAATLYVRNRVREAIRVSKIPDA |
| | | of PH20. | KSPLPVFAYTRIVFTDQVLKFLSQDELVY |
| | | | TFGETVALGASGIVIWGSWENTRTKESCQ |
| | | | AIKEYMDTTLNPYIINVTLAAKMCSQVLC |
| | | | QEQGVCIRKNWNSSDYLHLNPDNFAIQLE |
| | | | KGGKFTVRGKPTLEDLEQFSEKFYCSCYS |
| | | | TLSCKEKADVKDTDAVDVCIADAVCIDA |
| | | | F |
| HM197 | 279 | One amino acid residue | FRAPPVIPNVPFLWAWNAPSEFCLGKFDE |
| | | V463A is substituted | PLDMSLFSFIGSPRINATGQGVTIFYVDRL |
| | | from SEQ ID NO: 3, | GYYPYIDSITGVTVNGGIPQKISLQDHLDK |
| | | cleavage occurs before | AKKDITFYMPVDNLGMAVIDWEEWRPT |
| | | F38 amino acid residue | WARNWKPKDVYKNRSIELVQQQNVQLS |
| | | at N-terminus of PH20, | LTEATEKAKQEFEKAGKDFLVETIKLGKL |
| | | and cleavage occurs | LRPNHLWGYYLFPDCYNHHYKKPGYNG |
| | | after F468 amino acid | SCFNVEIKRNDDLSWLWNESTALYPSIYL |
| | | residue at C-terminus | NTQQSPVAATLYVRNRVREAIRVSKIPDA |
| | | of PH20. | KSPLPVFAYTRIVFTDQVLKFLSQDELVY |
| | | | TFGETVALGASGIVIWGSWENTRTKESCQ |
| | | | AIKEYMDTTLNPYIINVTLAAKMCSQVLC |
| | | | QEQGVCIRKNWNSSDYLHLNPDNFAIQLE |
| | | | KGGKFTVRGKPTLEDLEQFSEKFYCSCYS |
| | | | TLSCKEKADVKDTDAVDVCIADGACIDA |
| | | | F |
| HM198 | 280 | One amino acid residue | FRAPPVIPNVPFLWAWNAPSEFCLGKFDE |
| | | N82A is substituted | PLDMSLFSFIGSPRIAATGQGVTIFYVDRL |
| | | from SEQ ID NO: 3, | GYYPYIDSITGVTVNGGIPQKISLQDHLDK |
| | | cleavage occurs before | AKKDITFYMPVDNLGMAVIDWEEWRPT |
| | | F38 amino acid residue | WARNWKPKDVYKNRSIELVQQQNVQLS |
| | | at N-terminus of PH20, | LTEATEKAKQEFEKAGKDFLVETIKLGKL |
| | | and cleavage occurs | LRPNHLWGYYLFPDCYNHHYKKPGYNG |
| | | after F468 amino acid | SCFNVEIKRNDDLSWLWNESTALYPSIYL |
| | | residue at C-terminus | NTQQSPVAATLYVRNRVREAIRVSKIPDA |
| | | of PH20. | KSPLPVFAYTRIVFTDQVLKFLSQDELVY |
| | | | TFGETVALGASGIVIWGSWENTRTKESCQ |
| | | | AIKEYMDTTLNPYIINVTLAAKMCSQVLC |
| | | | QEQGVCIRKNWNSSDYLHLNPDNFAIQLE |
| | | | KGGKFTVRGKPTLEDLEQFSEKFYCSCYS |
| | | | TLSCKEKADVKDTDAVDVCIADGVCIDA |
| | | | F |
| HM199 | 281 | One amino acid residue | FRAPPVIPNVPFLWAWNAPSEFCLGKFDE |
| | | N166A is substituted | PLDMSLFSFIGSPRINATGQGVTIFYVDRL |
| | | from SEQ ID NO: 3, | GYYPYIDSITGVTVNGGIPQKISLQDHLDK |
| | | cleavage occurs before | AKKDITFYMPVDNLGMAVIDWEEWRPT |
| | | F38 amino acid residue | WARNWKPKDVYKARSIELVQQQNVQLS |
| | | at N-terminus of PH20, | LTEATEKAKQEFEKAGKDFLVETIKLGKL |
| | | and cleavage occurs | LRPNHLWGYYLFPDCYNHHYKKPGYNG |
| | | after F468 amino acid | SCFNVEIKRNDDLSWLWNESTALYPSIYL |
| | | residue at C-terminus | NTQQSPVAATLYVRNRVREAIRVSKIPDA |
| | | of PH20. | KSPLPVFAYTRIVFTDQVLKFLSQDELVY |
| | | | TFGETVALGASGIVIWGSWENTRTKESCQ |
| | | | AIKEYMDTTLNPYIINVTLAAKMCSQVLC |
| | | | QEQGVCIRKNWNSSDYLHLNPDNFAIQLE |
| | | | KGGKFTVRGKPTLEDLEQFSEKFYCSCYS |
| | | | TLSCKEKADVKDTDAVDVCIADGVCIDA |
| | | | F |
| HM203 | 282 | One amino acid residue | FRAPPVIPNVPFLWAWNAPSEFCLGKFDE |
| | | S104N is substituted | PLDMSLFSFIGSPRINATGQGVTIFYVDRL |
| | | from SEQ ID NO: 3, | GYYPYIDNITGVTVNGGIPQKISLQDHLD |
| | | cleavage occurs before | KAKKDITFYMPVDNLGMAVIDWEEWRP |
| | | F38 amino acid residue | TWARNWKPKDVYKNRSIELVQQQNVQL |
| | | at N-terminus of PH20, | SLTEATEKAKQEFEKAGKDFLVETIKLGK |
| | | and cleavage occurs | LLRPNHLWGYYLFPDCYNHHYKKPGYN |
| | | after F468 amino acid | GSCFNVEIKRNDDLSWLWNESTALYPSIY |
| | | residue at C-terminus | LNTQQSPVAATLYVRNRVREAIRVSKIPD |
| | | of PH20. | AKSPLPVFAYTRIVFTDQVLKFLSQDELV |
| | | | YTFGETVALGASGIVIWGSWENTRTKESC |
| | | | QAIKEYMDTTLNPYIINVTLAAKMCSQVL |
| | | | CQEQGVCIRKNWNSSDYLHLNPDNFAIQ |
| | | | LEKGGKFTVRGKPTLEDLEQFSEKFYCSC |
| | | | YSTLSCKEKADVKDTDAVDVCIADGVCI |
| | | | DAF |
| HM204 | 283 | One amino acid residue | FRAPPVIPNVPFLWAWNAPSEFCLGKFDE |
| | | I105Q is substituted | PLDMSLFSFIGSPRINATGQGVTIFYVDRL |
| | | from SEQ ID NO: 3, | GYYPYIDSQTGVTVNGGIPQKISLQDHLD |
| | | cleavage occurs before | KAKKDITFYMPVDNLGMAVIDWEEWRP |
| | | F38 amino acid residue | TWARNWKPKDVYKNRSIELVQQQNVQL |
| | | at N-terminus of PH20, | SLTEATEKAKQEFEKAGKDFLVETIKLGK |
| | | and cleavage occurs | LLRPNHLWGYYLFPDCYNHHYKKPGYN |
| | | after F468 amino acid | GSCFNVEIKRNDDLSWLWNESTALYPSIY |
| | | residue at C-terminus | LNTQQSPVAATLYVRNRVREAIRVSKIPD |
| | | of PH20. | AKSPLPVFAYTRIVFTDQVLKFLSQDELV |
| | | | YTFGETVALGASGIVIWGSWENTRTKESC |
| | | | QAIKEYMDTTLNPYIINVTLAAKMCSQVL |
| | | | CQEQGVCIRKNWNSSDYLHLNPDNFAIQ |
| | | | LEKGGKFTVRGKPTLEDLEQFSEKFYCSC |
| | | | YSTLSCKEKADVKDTDAVDVCIADGVCI |
| | | | DAF |
| HM205 | 284 | One amino acid residue | FRAPPVIPNVPFLWAWNAPSEFCLGKFDE |
| | | Q268D is substituted | PLDMSLFSFIGSPRINATGQGVTIFYVDRL |
| | | from SEQ ID NO: 3, | GYYPYIDSITGVTVNGGIPQKISLQDHLDK |
| | | cleavage occurs before | AKKDITFYMPVDNLGMAVIDWEEWRPT |
| | | F38 amino acid residue | WARNWKPKDVYKNRSIELVQQQNVQLS |
| | | at N-terminus of PH20, | LTEATEKAKQEFEKAGKDFLVETIKLGKL |
| | | and cleavage occurs | LRPNHLWGYYLFPDCYNHHYKKPGYNG |
| | | after F468 amino acid | SCFNVEIKRNDDLSWLWNESTALYPSIYL |
| | | residue at C-terminus | NTDQSPVAATLYVRNRVREAIRVSKIPDA |
| | | of PH20. | KSPLPVFAYTRIVFTDQVLKFLSQDELVY |
| | | | TFGETVALGASGIVIWGSWENTRTKESCQ |
| | | | AIKEYMDTTLNPYIINVTLAAKMCSQVLC |
| | | | QEQGVCIRKNWNSSDYLHLNPDNFAIQLE |
| | | | KGGKFTVRGKPTLEDLEQFSEKFYCSCYS |
| | | | TLSCKEKADVKDTDAVDVCIADGVCIDA |
| | | | F |
| HM208 | 285 | One amino acid residue | FRAPPVIPNVPFLWAWNAPSEFCLGKFDE |
| | | Q268I is substituted | PLDMSLFSFIGSPRINATGQGVTIFYVDRL |
| | | from SEQ ID NO: 3, | GYYPYIDSITGVTVNGGIPQKISLQDHLDK |
| | | cleavage occurs before | AKKDITFYMPVDNLGMAVIDWEEWRPT |
| | | F38 amino acid residue | WARNWKPKDVYKNRSIELVQQQNVQLS |
| | | at N-terminus of PH20, | LTEATEKAKQEFEKAGKDFLVETIKLGKL |
| | | and cleavage occurs | LRPNHLWGYYLFPDCYNHHYKKPGYNG |
| | | after F468 amino acid | SCFNVEIKRNDDLSWLWNESTALYPSIYL |
| | | residue at C-terminus | NTIQSPVAATLYVRNRVREAIRVSKIPDA |
| | | of PH20. | KSPLPVFAYTRIVFTDQVLKFLSQDELVY |
| | | | TFGETVALGASGIVIWGSWENTRTKESCQ |
| | | | AIKEYMDTTLNPYIINVTLAAKMCSQVLC |
| | | | QEQGVCIRKNWNSSDYLHLNPDNFAIQLE |
| | | | KGGKFTVRGKPTLEDLEQFSEKFYCSCYS |
| | | | TLSCKEKADVKDTDAVDVCIADGVCIDA |
| | | | F |
| HM210 | 286 | One amino acid residue | FRAPPVIPNVPFLWAWNAPSEFCLGKFDE |
| | | I291G is substituted | PLDMSLFSFIGSPRINATGQGVTIFYVDRL |
| | | from SEQ ID NO: 3, | GYYPYIDSITGVTVNGGIPQKISLQDHLDK |
| | | cleavage occurs before | AKKDITFYMPVDNLGMAVIDWEEWRPT |
| | | F38 amino acid residue | WARNWKPKDVYKNRSIELVQQQNVQLS |
| | | at N-terminus of PH20, | LTEATEKAKQEFEKAGKDFLVETIKLGKL |
| | | and cleavage occurs | LRPNHLWGYYLFPDCYNHHYKKPGYNG |
| | | after F468 amino acid | SCFNVEIKRNDDLSWLWNESTALYPSIYL |
| | | residue at C-terminus | NTQQSPVAATLYVRNRVREAIRVSKGPD |
| | | of PH20. | AKSPLPVFAYTRIVFTDQVLKFLSQDELV |
| | | | YTFGETVALGASGIVIWGSWENTRTKESC |
| | | | QAIKEYMDTTLNPYIINVTLAAKMCSQVL |
| | | | CQEQGVCIRKNWNSSDYLHLNPDNFAIQ |
| | | | LEKGGKFTVRGKPTLEDLEQFSEKFYCSC |
| | | | YSTLSCKEKADVKDTDAVDVCIADGVCI |
| | | | DAF |
| HM211 | 287 | One amino acid residue | FRAPPVIPNVPFLWAWNAPSEFCLGKFDE |
| | | P292D is substituted | PLDMSLFSFIGSPRINATGQGVTIFYVDRL |
| | | from SEQ ID NO: 3, | GYYPYIDSITGVTVNGGIPQKISLQDHLDK |
| | | cleavage occurs before | AKKDITFYMPVDNLGMAVIDWEEWRPT |
| | | F38 amino acid residue | WARNWKPKDVYKNRSIELVQQQNVQLS |
| | | at N-terminus of PH20, | LTEATEKAKQEFEKAGKDFLVETIKLGKL |
| | | and cleavage occurs | LRPNHLWGYYLFPDCYNHHYKKPGYNG |
| | | after F468 amino acid | SCFNVEIKRNDDLSWLWNESTALYPSIYL |
| | | residue at C-terminus | NTQQSPVAATLYVRNRVREAIRVSKIDDA |
| | | of PH20. | KSPLPVFAYTRIVFTDQVLKFLSQDELVY |
| | | | TFGETVALGASGIVIWGSWENTRTKESCQ |
| | | | AIKEYMDTTLNPYIINVTLAAKMCSQVLC |
| | | | QEQGVCIRKNWNSSDYLHLNPDNFAIQLE |
| | | | KGGKFTVRGKPTLEDLEQFSEKFYCSCYS |
| | | | TLSCKEKADVKDTDAVDVCIADGVCIDA |
| | | | F |
| HM212 | 288 | One amino acid residue | FRAPPVIPNVPFLWAWNAPSEFCLGKFDE |
| | | T452D is substituted | PLDMSLFSFIGSPRINATGQGVTIFYVDRL |
| | | from SEQ ID NO: 3, | GYYPYIDSITGVTVNGGIPQKISLQDHLDK |
| | | cleavage occurs before | AKKDITFYMPVDNLGMAVIDWEEWRPT |
| | | F38 amino acid residue | WARNWKPKDVYKNRSIELVQQQNVQLS |
| | | at N-terminus of PH20, | LTEATEKAKQEFEKAGKDFLVETIKLGKL |
| | | and cleavage occurs | LRPNHLWGYYLFPDCYNHHYKKPGYNG |
| | | after F468 amino acid | SCFNVEIKRNDDLSWLWNESTALYPSIYL |
| | | residue at C-terminus | NTQQSPVAATLYVRNRVREAIRVSKIPDA |
| | | of PH20. | KSPLPVFAYTRIVFTDQVLKFLSQDELVY |
| | | | TFGETVALGASGIVIWGSWENTRTKESCQ |
| | | | AIKEYMDTTLNPYIINVTLAAKMCSQVLC |
| | | | QEQGVCIRKNWNSSDYLHLNPDNFAIQLE |
| | | | KGGKFTVRGKPTLEDLEQFSEKFYCSCYS |
| | | | TLSCKEKADVKDDDAVDVCIADGVCIDA |
| | | | F |
| HM213 | 289 | One amino acid residue | FRAPPVIPNVPFLWAWNAPSEFCLGKFDE |
| | | T452H is substituted | PLDMSLFSFIGSPRINATGQGVTIFYVDRL |
| | | from SEQ ID NO: 3, | GYYPYIDSITGVTVNGGIPQKISLQDHLDK |
| | | cleavage occurs before | AKKDITFYMPVDNLGMAVIDWEEWRPT |
| | | F38 amino acid residue | WARNWKPKDVYKNRSIELVQQQNVQLS |
| | | at N-terminus of PH20, | LTEATEKAKQEFEKAGKDFLVETIKLGKL |
| | | and cleavage occurs | LRPNHLWGYYLFPDCYNHHYKKPGYNG |
| | | after F468 amino acid | SCFNVEIKRNDDLSWLWNESTALYPSIYL |
| | | residue at C-terminus | NTQQSPVAATLYVRNRVREAIRVSKIPDA |
| | | of PH20. | KSPLPVFAYTRIVFTDQVLKFLSQDELVY |
| | | | TFGETVALGASGIVIWGSWENTRTKESCQ |
| | | | AIKEYMDTTLNPYIINVTLAAKMCSQVLC |
| | | | QEQGVCIRKNWNSSDYLHLNPDNFAIQLE |
| | | | KGGKFTVRGKPTLEDLEQFSEKFYCSCYS |
| | | | TLSCKEKADVKDHDAVDVCIADGVCIDA |
| | | | F |
| HM214 | 290 | One amino acid residue | FRAPPVIPNVPFLWAWNAPSEFCLGKFDE |
| | | T452K is substituted | PLDMSLFSFIGSPRINATGQGVTIFYVDRL |
| | | from SEQ ID NO: 3, | GYYPYIDSITGVTVNGGIPQKISLQDHLDK |
| | | cleavage occurs before | AKKDITFYMPVDNLGMAVIDWEEWRPT |
| | | F38 amino acid residue | WARNWKPKDVYKNRSIELVQQQNVQLS |
| | | at N-terminus of PH20, | LTEATEKAKQEFEKAGKDFLVETIKLGKL |
| | | and cleavage occurs | LRPNHLWGYYLFPDCYNHHYKKPGYNG |
| | | after F468 amino acid | SCFNVEIKRNDDLSWLWNESTALYPSIYL |
| | | residue at C-terminus | NTQQSPVAATLYVRNRVREAIRVSKIPDA |
| | | of PH20. | KSPLPVFAYTRIVFTDQVLKFLSQDELVY |
| | | | TFGETVALGASGIVIWGSWENTRTKESCQ |
| | | | AIKEYMDTTLNPYIINVTLAAKMCSQVLC |
| | | | QEQGVCIRKNWNSSDYLHLNPDNFAIQLE |
| | | | KGGKFTVRGKPTLEDLEQFSEKFYCSCYS |
| | | | TLSCKEKADVKDKDAVDVCIADGVCIDA |
| HM216 | 291 | One amino acid residue | FRAPPVIPNVPFLWAWNAPSEFCLGKFDE |
| | | T452G is substituted | PLDMSLFSFIGSPRINATGQGVTIFYVDRL |
| | | from SEQ ID NO: 3, | GYYPYIDSITGVTVNGGIPQKISLQDHLDK |
| | | cleavage occurs before | AKKDITFYMPVDNLGMAVIDWEEWRPT |
| | | F38 amino acid residue | WARNWKPKDVYKNRSIELVQQQNVQLS |
| | | at N-terminus of PH20, | LTEATEKAKQEFEKAGKDFLVETIKLGKL |
| | | and cleavage occurs | LRPNHLWGYYLFPDCYNHHYKKPGYNG |
| | | after F468 amino acid | SCFNVEIKRNDDLSWLWNESTALYPSIYL |
| | | residue at C-terminus | NTQQSPVAATLYVRNRVREAIRVSKIPDA |
| | | of PH20. | KSPLPVFAYTRIVFTDQVLKFLSQDELVY |
| | | | TFGETVALGASGIVIWGSWENTRTKESCQ |
| | | | AIKEYMDTTLNPYIINVTLAAKMCSQVLC |
| | | | QEQGVCIRKNWNSSDYLHLNPDNFAIQLE |
| | | | KGGKFTVRGKPTLEDLEQFSEKFYCSCYS |
| | | | TLSCKEKADVKDGDAVDVCIADGVCIDA |
| | | | F |
| HM217 | 292 | One amino acid residue | FRAPPVIPNVPFLWAWNAPSEFCLGKFDE |
| | | T452P is substituted | PLDMSLFSFIGSPRINATGQGVTIFYVDRL |
| | | from SEQ ID NO: 3, | GYYPYIDSITGVTVNGGIPQKISLQDHLDK |
| | | cleavage occurs before | AKKDITFYMPVDNLGMAVIDWEEWRPT |
| | | F38 amino acid residue | WARNWKPKDVYKNRSIELVQQQNVQLS |
| | | at N-terminus of PH20, | LTEATEKAKQEFEKAGKDFLVETIKLGKL |
| | | and cleavage occurs | LRPNHLWGYYLFPDCYNHHYKKPGYNG |
| | | after F468 amino acid | SCFNVEIKRNDDLSWLWNESTALYPSIYL |
| | | residue at C-terminus | NTQQSPVAATLYVRNRVREAIRVSKIPDA |
| | | of PH20. | KSPLPVFAYTRIVFTDQVLKFLSQDELVY |
| | | | TFGETVALGASGIVIWGSWENTRTKESCQ |
| | | | AIKEYMDTTLNPYIINVTLAAKMCSQVLC |
| | | | QEQGVCIRKNWNSSDYLHLNPDNFAIQLE |
| | | | KGGKFTVRGKPTLEDLEQFSEKFYCSCYS |
| | | | TLSCKEKADVKDPDAVDVCIADGVCIDA |
| | | | F |
| HM218 | 293 | One amino acid residue | FRAPPVIPNVPFLWAWNAPSEFCLGKFDE |
| | | T452M is substituted | PLDMSLFSFIGSPRINATGQGVTIFYVDRL |
| | | from SEQ ID NO: 3, | GYYPYIDSITGVTVNGGIPQKISLQDHLDK |
| | | cleavage occurs before | AKKDITFYMPVDNLGMAVIDWEEWRPT |
| | | F38 amino acid residue | WARNWKPKDVYKNRSIELVQQQNVQLS |
| | | at N-terminus of PH20, | LTEATEKAKQEFEKAGKDFLVETIKLGKL |
| | | and cleavage occurs | LRPNHLWGYYLFPDCYNHHYKKPGYNG |
| | | after F468 amino acid | SCFNVEIKRNDDLSWLWNESTALYPSIYL |
| | | residue at C-terminus | NTQQSPVAATLYVRNRVREAIRVSKIPDA |
| | | of PH20. | KSPLPVFAYTRIVFTDQVLKFLSQDELVY |
| | | | TFGETVALGASGIVIWGSWENTRTKESCQ |
| | | | AIKEYMDTTLNPYIINVTLAAKMCSQVLC |
| | | | QEQGVCIRKNWNSSDYLHLNPDNFAIQLE |
| | | | KGGKFTVRGKPTLEDLEQFSEKFYCSCYS |
| | | | TLSCKEKADVKDMDAVDVCIADGVCIDA |
| | | | F |
| HM219 | 294 | One amino acid residue | FRAPPVIPNVPFLWAWNAPSEFCLGKFDE |
| | | T452F is substituted | PLDMSLFSFIGSPRINATGQGVTIFYVDRL |
| | | from SEQ ID NO: 3, | GYYPYIDSITGVTVNGGIPQKISLQDHLDK |
| | | cleavage occurs before | AKKDITFYMPVDNLGMAVIDWEEWRPT |
| | | F38 amino acid residue | WARNWKPKDVYKNRSIELVQQQNVQLS |
| | | at N-terminus of PH20, | LTEATEKAKQEFEKAGKDFLVETIKLGKL |
| | | and cleavage occurs | LRPNHLWGYYLFPDCYNHHYKKPGYNG |
| | | after F468 amino acid | SCFNVEIKRNDDLSWLWNESTALYPSIYL |
| | | residue at C-terminus | NTQQSPVAATLYVRNRVREAIRVSKIPDA |
| | | of PH20. | KSPLPVFAYTRIVFTDQVLKFLSQDELVY |
| | | | TFGETVALGASGIVIWGSWENTRTKESCQ |
| | | | AIKEYMDTTLNPYIINVTLAAKMCSQVLC |
| | | | QEQGVCIRKNWNSSDYLHLNPDNFAIQLE |
| | | | KGGKFTVRGKPTLEDLEQFSEKFYCSCYS |
| | | | TLSCKEKADVKDFDAVDVCIADGVCIDA |
| | | | F |
| HM220 | 295 | One amino acid residue | FRAPPVIPNVPFLWAWNAPSEFCLGKFDE |
| | | D461R is substituted | PLDMSLFSFIGSPRINATGQGVTIFYVDRL |
| | | from SEQ ID NO: 3, | GYYPYIDSITGVTVNGGIPQKISLQDHLDK |
| | | cleavage occurs before | AKKDITFYMPVDNLGMAVIDWEEWRPT |
| | | F38 amino acid residue | WARNWKPKDVYKNRSIELVQQQNVQLS |
| | | at N-terminus of PH20, | LTEATEKAKQEFEKAGKDFLVETIKLGKL |
| | | and cleavage occurs | LRPNHLWGYYLFPDCYNHHYKKPGYNG |
| | | after F468 amino acid | SCFNVEIKRNDDLSWLWNESTALYPSIYL |
| | | residue at C-terminus | NTQQSPVAATLYVRNRVREAIRVSKIPDA |
| | | of PH20. | KSPLPVFAYTRIVFTDQVLKFLSQDELVY |
| | | | TFGETVALGASGIVIWGSWENTRTKESCQ |
| | | | AIKEYMDTTLNPYIINVTLAAKMCSQVLC |
| | | | QEQGVCIRKNWNSSDYLHLNPDNFAIQLE |
| | | | KGGKFTVRGKPTLEDLEQFSEKFYCSCYS |
| | | | TLSCKEKADVKDTDAVDVCIARGVCIDA |
| | | | F |
| HM231 | 296 | One amino acid residue | FRAPPVIPNVPFLWAWNAPSEFCLGKFDE |
| | | V463Y is substituted | PLDMSLFSFIGSPRINATGQGVTIFYVDRL |
| | | from SEQ ID NO: 3, | GYYPYIDSITGVTVNGGIPQKISLQDHLDK |
| | | cleavage occurs before | AKKDITFYMPVDNLGMAVIDWEEWRPT |
| | | F38 amino acid residue | WARNWKPKDVYKNRSIELVQQQNVQLS |
| | | at N-terminus of PH20, | LTEATEKAKQEFEKAGKDFLVETIKLGKL |
| | | and cleavage occurs | LRPNHLWGYYLFPDCYNHHYKKPGYNG |
| | | after F468 amino acid | SCFNVEIKRNDDLSWLWNESTALYPSIYL |
| | | residue at C-terminus | NTQQSPVAATLYVRNRVREAIRVSKIPDA |
| | | of PH20. | KSPLPVFAYTRIVFTDQVLKFLSQDELVY |
| | | | TFGETVALGASGIVIWGSWENTRTKESCQ |
| | | | AIKEYMDTTLNPYIINVTLAAKMCSQVLC |
| | | | QEQGVCIRKNWNSSDYLHLNPDNFAIQLE |
| | | | KGGKFTVRGKPTLEDLEQFSEKFYCSCYS |
| | | | TLSCKEKADVKDTDAVDVCIADGYCIDA |
| | | | F |
| HM232 | 297 | One amino acid residue | FRAPPVIPNVPFLWAWNAPSEFCLGKFDE |
| | | S180T is substituted | PLDMSLFSFIGSPRINATGQGVTIFYVDRL |
| | | from SEQ ID NO: 3, | GYYPYIDSITGVTVNGGIPQKISLQDHLDK |
| | | cleavage occurs before | AKKDITFYMPVDNLGMAVIDWEEWRPT |
| | | F38 amino acid residue | WARNWKPKDVYKNRSIELVQQQNVQLT |
| | | at N-terminus of PH20, | LTEATEKAKQEFEKAGKDFLVETIKLGKL |
| | | and cleavage occurs | LRPNHLWGYYLFPDCYNHHYKKPGYNG |
| | | after F468 amino acid | SCFNVEIKRNDDLSWLWNESTALYPSIYL |
| | | residue at C-terminus | NTQQSPVAATLYVRNRVREAIRVSKIPDA |
| | | of PH20. | KSPLPVFAYTRIVFTDQVLKFLSQDELVY |
| | | | TFGETVALGASGIVIWGSWENTRTKESCQ |
| | | | AIKEYMDTTLNPYIINVTLAAKMCSQVLC |
| | | | QEQGVCIRKNWNSSDYLHLNPDNFAIQLE |
| | | | KGGKFTVRGKPTLEDLEQFSEKFYCSCYS |
| | | | TLSCKEKADVKDTDAVDVCIADGVCIDA |
| | | | F |
| HM233 | 298 | One amino acid residue | FRAPPVIPNVPFLWAWNAPSEFCLGKFDE |
| | | D451S is substituted | PLDMSLFSFIGSPRINATGQGVTIFYVDRL |
| | | from SEQ ID NO: 3, | GYYPYIDSITGVTVNGGIPQKISLQDHLDK |
| | | cleavage occurs before | AKKDITFYMPVDNLGMAVIDWEEWRPT |
| | | F38 amino acid residue | WARNWKPKDVYKNRSIELVQQQNVQLS |
| | | at N-terminus of PH20, | LTEATEKAKQEFEKAGKDFLVETIKLGKL |
| | | and cleavage occurs | LRPNHLWGYYLFPDCYNHHYKKPGYNG |
| | | after F468 amino acid | SCFNVEIKRNDDLSWLWNESTALYPSIYL |
| | | residue at C-terminus | NTQQSPVAATLYVRNRVREAIRVSKIPDA |
| | | of PH20. | KSPLPVFAYTRIVFTDQVLKFLSQDELVY |
| | | | TFGETVALGASGIVIWGSWENTRTKESCQ |
| | | | AIKEYMDTTLNPYIINVTLAAKMCSQVLC |
| | | | QEQGVCIRKNWNSSDYLHLNPDNFAIQLE |
| | | | KGGKFTVRGKPTLEDLEQFSEKFYCSCYS |
| | | | TLSCKEKADVKSTDAVDVCIADGVCIDAF |
| HM234 | 299 | One amino acid residue | FRAPPVIPNVPFLWAWNAPSEFCLGKFDE |
| | | L313P is substituted | PLDMSLFSFIGSPRINATGQGVTIFYVDRL |
| | | from SEQ ID NO: 3, | GYYPYIDSITGVTVNGGIPQKISLQDHLDK |
| | | cleavage occurs before | AKKDITFYMPVDNLGMAVIDWEEWRPT |
| | | F38 amino acid residue | WARNWKPKDVYKNRSIELVQQQNVQLS |
| | | at N-terminus of PH20, | LTEATEKAKQEFEKAGKDFLVETIKLGKL |
| | | and cleavage occurs | LRPNHLWGYYLFPDCYNHHYKKPGYNG |
| | | after F468 amino acid | SCFNVEIKRNDDLSWLWNESTALYPSIYL |
| | | residue at C-terminus | NTQQSPVAATLYVRNRVREAIRVSKIPDA |
| | | of PH20. | KSPLPVFAYTRIVFTDQVPKFLSQDELVY |
| | | | TFGETVALGASGIVIWGSWENTRTKESCQ |
| | | | AIKEYMDTTLNPYIINVTLAAKMCSQVLC |
| | | | QEQGVCIRKNWNSSDYLHLNPDNFAIQLE |
| | | | KGGKFTVRGKPTLEDLEQFSEKFYCSCYS |
| | | | TLSCKEKADVKDTDAVDVCIADGVCIDA |
| | | | F |
| HM235 | 300 | One amino acid residue | FRAPPVIPNVPFLWAWNAPSEFCLGKFDE |
| | | L313M is substituted | PLDMSLFSFIGSPRINATGQGVTIFYVDRL |
| | | from SEQ ID NO: 3, | GYYPYIDSITGVTVNGGIPQKISLQDHLDK |
| | | cleavage occurs before | AKKDITFYMPVDNLGMAVIDWEEWRPT |
| | | F38 amino acid residue | WARNWKPKDVYKNRSIELVQQQNVQLS |
| | | at N-terminus of PH20, | LTEATEKAKQEFEKAGKDFLVETIKLGKL |
| | | and cleavage occurs | LRPNHLWGYYLFPDCYNHHYKKPGYNG |
| | | after F468 amino acid | SCFNVEIKRNDDLSWLWNESTALYPSIYL |
| | | residue at C-terminus | NTQQSPVAATLYVRNRVREAIRVSKIPDA |
| | | of PH20. | KSPLPVFAYTRIVFTDQVMKFLSQDELVY |
| | | | TFGETVALGASGIVIWGSWENTRTKESCQ |
| | | | AIKEYMDTTLNPYIINVTLAAKMCSQVLC |
| | | | QEQGVCIRKNWNSSDYLHLNPDNFAIQLE |
| | | | KGGKFTVRGKPTLEDLEQFSEKFYCSCYS |
| | | | TLSCKEKADVKDTDAVDVCIADGVCIDA |
| | | | F |
| HM243 | 301 | One amino acid residue | FRAPPVIPNVPFLWAWNAPSEFCLGKFDE |
| | | L179S is substituted | PLDMSLFSFIGSPRINATGQGVTIFYVDRL |
| | | from SEQ ID NO: 3, | GYYPYIDSITGVTVNGGIPQKISLQDHLDK |
| | | cleavage occurs before | AKKDITFYMPVDNLGMAVIDWEEWRPT |
| | | F38 amino acid residue | WARNWKPKDVYKNRSIELVQQQNVQSS |
| | | at N-terminus of PH20, | LTEATEKAKQEFEKAGKDFLVETIKLGKL |
| | | and cleavage occurs | LRPNHLWGYYLFPDCYNHHYKKPGYNG |
| | | after F468 amino acid | SCFNVEIKRNDDLSWLWNESTALYPSIYL |
| | | residue at C-terminus | NTQQSPVAATLYVRNRVREAIRVSKIPDA |
| | | of PH20. | KSPLPVFAYTRIVFTDQVLKFLSQDELVY |
| | | | TFGETVALGASGIVIWGSWENTRTKESCQ |
| | | | AIKEYMDTTLNPYIINVTLAAKMCSQVLC |
| | | | QEQGVCIRKNWNSSDYLHLNPDNFAIQLE |
| | | | KGGKFTVRGKPTLEDLEQFSEKFYCSCYS |
| | | | TLSCKEKADVKDTDAVDVCIADGVCIDA |
| | | | F |
| HM245 | 302 | One amino acid residue | FRAPPVIPNVPFLWAWNAPSEFCLGKFDE |
| | | L179I is substituted | PLDMSLFSFIGSPRINATGQGVTIFYVDRL |
| | | from SEQ ID NO: 3, | GYYPYIDSITGVTVNGGIPQKISLQDHLDK |
| | | cleavage occurs before | AKKDITFYMPVDNLGMAVIDWEEWRPT |
| | | F38 amino acid residue | WARNWKPKDVYKNRSIELVQQQNVQISL |
| | | at N-terminus of PH20, | TEATEKAKQEFEKAGKDFLVETIKLGKLL |
| | | and cleavage occurs | RPNHLWGYYLFPDCYNHHYKKPGYNGS |
| | | after F468 amino acid | CFNVEIKRNDDLSWLWNESTALYPSIYLN |
| | | residue at C-terminus | TQQSPVAATLYVRNRVREAIRVSKIPDAK |
| | | of PH20. | SPLPVFAYTRIVFTDQVLKFLSQDELVYTF |
| | | | GETVALGASGIVIWGSWENTRTKESCQAI |
| | | | KEYMDTTLNPYIINVTLAAKMCSQVLCQ |
| | | | EQGVCIRKNWNSSDYLHLNPDNFAIQLEK |
| | | | GGKFTVRGKPTLEDLEQFSEKFYCSCYST |
| | | | LSCKEKADVKDTDAVDVCIADGVCIDAF |
| HM246 | 303 | One amino acid residue | FRAPPVIPNVPFLWAWNAPSEFCLGKFDE |
| | | L179F is substituted | PLDMSLFSFIGSPRINATGQGVTIFYVDRL |
| | | from SEQ ID NO: 3, | GYYPYIDSITGVTVNGGIPQKISLQDHLDK |
| | | cleavage occurs before | AKKDITFYMPVDNLGMAVIDWEEWRPT |
| | | F38 amino acid residue | WARNWKPKDVYKNRSIELVQQQNVQFS |
| | | at N-terminus of PH20, | LTEATEKAKQEFEKAGKDFLVETIKLGKL |
| | | and cleavage occurs | LRPNHLWGYYLFPDCYNHHYKKPGYNG |
| | | after F468 amino acid | SCFNVEIKRNDDLSWLWNESTALYPSIYL |
| | | residue at C-terminus | NTQQSPVAATLYVRNRVREAIRVSKIPDA |
| | | of PH20. | KSPLPVFAYTRIVFTDQVLKFLSQDELVY |
| | | | TFGETVALGASGIVIWGSWENTRTKESCQ |
| | | | AIKEYMDTTLNPYIINVTLAAKMCSQVLC |
| | | | QEQGVCIRKNWNSSDYLHLNPDNFAIQLE |
| | | | KGGKFTVRGKPTLEDLEQFSEKFYCSCYS |
| | | | TLSCKEKADVKDTDAVDVCIADGVCIDA |
| | | | F |
| HM254 | 304 | 3 amino acid residues | FRAPPVIPNVPFLWAWNAPSEFCLGKFDE |
| | | N344F, K348Q and | PLDMSLFSFIGSPRINATGQGVTIFYVDRL |
| | | K355Q are substituted | GYYPYIDSITGVTVNGGIPQKISLQDHLDK |
| | | from SEQ ID NO: 3, | AKKDITFYMPVDNLGMAVIDWEEWRPT |
| | | cleavage occurs before | WARNWKPKDVYKNRSIELVQQQNVQLS |
| | | F38 amino acid residue | LTEATEKAKQEFEKAGKDFLVETIKLGKL |
| | | at N-terminus of PH20, | LRPNHLWGYYLFPDCYNHHYKKPGYNG |
| | | and cleavage occurs | SCFNVEIKRNDDLSWLWNESTALYPSIYL |
| | | after F468 amino acid | NTQQSPVAATLYVRNRVREAIRVSKIPDA |
| | | residue at C-terminus | KSPLPVFAYTRIVFTDQVLKFLSQDELVY |
| | | of PH20. | TFGETVALGASGIVIWGSWEFTRTQESCQ |
| | | | AIQEYMDTTLNPYIINVTLAAKMCSQVLC |
| | | | QEQGVCIRKNWNSSDYLHLNPDNFAIQLE |
| | | | KGGKFTVRGKPTLEDLEQFSEKFYCSCYS |
| | | | TLSCKEKADVKDTDAVDVCIADGVCIDA |
| | | | F |
| HM261 | 305 | 7 amino acid residues | FRAPPVIPNVPFLWAWNAPSEFCLGKFDE |
| | | T132S, L181A, E186D, | PLDMSLFSFIGSPRINATGQGVTIFYVDRL |
| | | Q268N, I291L, V312A, | GYYPYIDSITGVTVNGGIPQKISLQDHLDK |
| | | and T452D are | AKKDISFYMPVDNLGMAVIDWEEWRPT |
| | | substituted from SEQ | WARNWKPKDVYKNRSIELVQQQNVQLS |
| | | ID NO: 3, cleavage | ATEATDKAKQEFEKAGKDFLVETIKLGK |
| | | occurs before F38 | LLRPNHLWGYYLFPDCYNHHYKKPGYN |
| | | amino acid residue at | GSCFNVEIKRNDDLSWLWNESTALYPSIY |
| | | N-terminus of PH20, | LNTNQSPVAATLYVRNRVREAIRVSKLPD |
| | | and cleavage occurs | AKSPLPVFAYTRIVFTDQALKFLSQDELV |
| | | after F468 amino acid | YTFGETVALGASGIVIWGSWENTRTKESC |
| | | residue at C-terminus | QAIKEYMDTTLNPYIINVTLAAKMCSQVL |
| | | of PH20. | CQEQGVCIRKNWNSSDYLHLNPDNFAIQ |
| | | | LEKGGKFTVRGKPTLEDLEQFSEKFYCSC |
| | | | YSTLSCKEKADVKDDDAVDVCIADGVCI |
| | | | DAF |
| HM262 | 306 | No additional | NFRAPPVIPNVPFLWAWNAPSEFCLGKFD |
| | | substitution occurs, | EPLDMSLFSFIGSPRINATGQGVTIFYVDR |
| | | cleavage occurs before | LGYYPYIDSITGVTVNGGIPQKISLQDHLD |
| | | N37 amino acid residue | KAKKDITFYMPVDNLGMAVIDWEEWRP |
| | | at N-terminus of PH20, | TWARNWKPKDVYKNRSIELVQQQNVQL |
| | | and cleavage occurs | SLTEATEKAKQEFEKAGKDFLVETIKLGK |
| | | after F468 amino acid | LLRPNHLWGYYLFPDCYNHHYKKPGYN |
| | | residue at C-terminus | GSCFNVEIKRNDDLSWLWNESTALYPSIY |
| | | of PH20. | LNTQQSPVAATLYVRNRVREAIRVSKIPD |
| | | | AKSPLPVFAYTRIVFTDQVLKFLSQDELV |
| | | | YTFGETVALGASGIVIWGSWENTRTKESC |
| | | | QAIKEYMDTTLNPYIINVTLAAKMCSQVL |
| | | | CQEQGVCIRKNWNSSDYLHLNPDNFAIQ |
| | | | LEKGGKFTVRGKPTLEDLEQFSEKFYCSC |
| | | | YSTLSCKEKADVKDTDAVDVCIADGVCI |
| | | | DAF |
| HM263 | 307 | No additional | LNFRAPPVIPNVPFLWAWNAPSEFCLGKF |
| | | substitution occurs, | DEPLDMSLFSFIGSPRINATGQGVTIFYVD |
| | | cleavage occurs before | RLGYYPYIDSITGVTVNGGIPQKISLQDHL |
| | | L36 amino acid residue | DKAKKDITFYMPVDNLGMAVIDWEEWR |
| | | at N-terminus of PH20, | PTWARNWKPKDVYKNRSIELVQQQNVQ |
| | | and cleavage occurs | LSLTEATEKAKQEFEKAGKDFLVETIKLG |
| | | after F468 amino acid | KLLRPNHLWGYYLFPDCYNHHYKKPGY |
| | | residue at C-terminus | NGSCFNVEIKRNDDLSWLWNESTALYPSI |
| | | of PH20. | YLNTQQSPVAATLYVRNRVREAIRVSKIP |
| | | | DAKSPLPVFAYTRIVFTDQVLKFLSQDEL |
| | | | VYTFGETVALGASGIVIWGSWENTRTKES |
| | | | CQAIKEYMDTTLNPYIINVTLAAKMCSQV |
| | | | LCQEQGVCIRKNWNSSDYLHLNPDNFAI |
| | | | QLEKGGKFTVRGKPTLEDLEQFSEKFYCS |
| | | | CYSTLSCKEKADVKDTDAVDVCIADGVC |
| | | | IDAF |
| HM266 | 308 | 9 amino acid residues | FKAPPVIPNVPFLWAWNAPSEFCLGKFDE |
| | | R39K, I105A, T132S, | PLDMSLFSFIGSPRINATGQGVTIFYVDRL |
| | | L181M, E186D, I291L, | GYYPYIDSATGVTVNGGIPQKISLQDHLD |
| | | Q268A, V312A and | KAKKDISFYMPVDNLGMAVIDWEEWRPT |
| | | T452D are substituted | WARNWKPKDVYKNRSIELVQQQNVQLS |
| | | from SEQ ID NO: 3, | MTEATDKAKQEFEKAGKDFLVETIKLGK |
| | | cleavage occurs before | LLRPNHLWGYYLFPDCYNHHYKKPGYN |
| | | F38 amino acid residue | GSCFNVEIKRNDDLSWLWNESTALYPSIY |
| | | at N-terminus of PH20, | LNTAQSPVAATLYVRNRVREAIRVSKLPD |
| | | and cleavage occurs | AKSPLPVFAYTRIVFTDQALKFLSQDELV |
| | | after F468 amino acid | YTFGETVALGASGIVIWGSWENTRTKESC |
| | | residue at C-terminus | QAIKEYMDTTLNPYIINVTLAAKMCSQVL |
| | | of PH20. | CQEQGVCIRKNWNSSDYLHLNPDNFAIQ |
| | | | LEKGGKFTVRGKPTLEDLEQFSEKFYCSC |
| | | | YSTLSCKEKADVKDDDAVDVCIADGVCI |
| | | | DAF |
| HM268 | 309 | 7 amino acid residues | FRAPPVIPNVPFLWAWNAPSEFCLGKFDE |
| | | T132A, L181A, | PLDMSLFSFIGSPRINATGQGVTIFYVDRL |
| | | E186A, Q268A, I291L, | GYYPYIDSITGVTVNGGIPQKISLQDHLDK |
| | | V312A, and T452D are | AKKDIAFYMPVDNLGMAVIDWEEWRPT |
| | | substituted from SEQ | WARNWKPKDVYKNRSIELVQQQNVQLS |
| | | ID NO: 3, cleavage | ATEATAKAKQEFEKAGKDFLVETIKLGK |
| | | occurs before F38 | LLRPNHLWGYYLFPDCYNHHYKKPGYN |
| | | amino acid residue at | GSCFNVEIKRNDDLSWLWNESTALYPSIY |
| | | N-terminus of PH20, | LNTAQSPVAATLYVRNRVREAIRVSKLPD |
| | | and cleavage occurs | AKSPLPVFAYTRIVFTDQALKFLSQDELV |
| | | after F468 amino acid | YTFGETVALGASGIVIWGSWENTRTKESC |
| | | residue at C-terminus | QAIKEYMDTTLNPYIINVTLAAKMCSQVL |
| | | of PH20. | CQEQGVCIRKNWNSSDYLHLNPDNFAIQ |
| | | | LEKGGKFTVRGKPTLEDLEQFSEKFYCSC |
| | | | YSTLSCKEKADVKDDDAVDVCIADGVCI |
| | | | DAF |
| HM271 | 310 | 2 amino acid residues | FRAPPVIPNVPFLWAWNAPSEFCLGKFDE |
| | | N344I and K348M are | PLDMSLFSFIGSPRINATGQGVTIFYVDRL |
| | | substituted from SEQ | GYYPYIDSITGVTVNGGIPQKISLQDHLDK |
| | | ID NO: 3, cleavage | AKKDITFYMPVDNLGMAVIDWEEWRPT |
| | | occurs before F38 | WARNWKPKDVYKNRSIELVQQQNVQLS |
| | | amino acid residue at | LTEATEKAKQEFEKAGKDFLVETIKLGKL |
| | | N-terminus of PH20, | LRPNHLWGYYLFPDCYNHHYKKPGYNG |
| | | and cleavage occurs | SCFNVEIKRNDDLSWLWNESTALYPSIYL |
| | | after F468 amino acid | NTQQSPVAATLYVRNRVREAIRVSKIPDA |
| | | residue at C-terminus | KSPLPVFAYTRIVFTDQVLKFLSQDELVY |
| | | of PH20. | TFGETVALGASGIVIWGSWEITRTMESCQ |
| | | | AIKEYMDTTLNPYIINVTLAAKMCSQVLC |
| | | | QEQGVCIRKNWNSSDYLHLNPDNFAIQLE |
| | | | KGGKFTVRGKPTLEDLEQFSEKFYCSCYS |
| | | | TLSCKEKADVKDTDAVDVCIADGVCIDA |
| | | | F |
| HM275 | 311 | 10 amino acid residues | FRAPPVIPNVPFLWAWNAPSEFCLGKFDE |
| | | S341D, W342L, | PLDMSLFSFIGSPRINATGQGVTIFYVDRL |
| | | E343S, N344I, T345S, | GYYPYIDSITGVTVNGGIPQKISLQDHLDK |
| | | R346S, K348M, | AKKDITFYMPVDNLGMAVIDWEEWRPT |
| | | K355D, D359E and | WARNWKPKDVYKNRSIELVQQQNVQLS |
| | | T361I are substituted | LTEATEKAKQEFEKAGKDFLVETIKLGKL |
| | | from SEQ ID NO: 3, | LRPNHLWGYYLFPDCYNHHYKKPGYNG |
| | | cleavage occurs before | SCFNVEIKRNDDLSWLWNESTALYPSIYL |
| | | F38 amino acid residue | NTQQSPVAATLYVRNRVREAIRVSKIPDA |
| | | at N-terminus of PH20, | KSPLPVFAYTRIVFTDQVLKFLSQDELVY |
| | | and cleavage occurs | TFGETVALGASGIVIWGDLSISSTMESCQ |
| | | after F468 amino acid | AIDEYMETILNPYIINVTLAAKMCSQVLC |
| | | residue at C-terminus | QEQGVCIRKNWNSSDYLHLNPDNFAIQLE |
| | | of PH20. | KGGKFTVRGKPTLEDLEQFSEKFYCSCYS |
| | | | TLSCKEKADVKDTDAVDVCIADGVCIDA |
| | | | F |
| HM276 | 312 | 9 amino acid residues | FRAPPVIPNVPFLWAWNAPSEFCLGKFDE |
| | | S341D, W342L, | PLDMSLFSFIGSPRINATGQGVTIFYVDRL |
| | | E343S, N344I, T345S, | GYYPYIDSITGVTVNGGIPQKISLQDHLDK |
| | | K348M, K355D, | AKKDITFYMPVDNLGMAVIDWEEWRPT |
| | | D359E, and T361I are | WARNWKPKDVYKNRSIELVQQQNVQLS |
| | | substituted from SEQ | LTEATEKAKQEFEKAGKDFLVETIKLGKL |
| | | ID NO: 3, cleavage | LRPNHLWGYYLFPDCYNHHYKKPGYNG |
| | | occurs before F38 | SCFNVEIKRNDDLSWLWNESTALYPSIYL |
| | | amino acid residue at | NTQQSPVAATLYVRNRVREAIRVSKIPDA |
| | | N-terminus of PH20, | KSPLPVFAYTRIVFTDQVLKFLSQDELVY |
| | | and cleavage occurs | TFGETVALGASGIVIWGDLSISRTMESCQ |
| | | after F468 amino acid | AIDEYMETILNPYIINVTLAAKMCSQVLC |
| | | residue at C-terminus | QEQGVCIRKNWNSSDYLHLNPDNFAIQLE |
| | | of PH20. | KGGKFTVRGKPTLEDLEQFSEKFYCSCYS |
| | | | TLSCKEKADVKDTDAVDVCIADGVCIDA |
| | | | F |
| HM279 | 313 | 8 amino acid residues | FRAPPVIPNVPFLWAWNAPSEFCLGKFDE |
| | | T132S, L181A, E186D, | PLDMSLFSFIGSPRINATGQGVTIFYVDRL |
| | | Q268N, 1291L, V312A, | GYYPYIDSITGVTVNGGIPQKISLQDHLDK |
| | | T452D and K348M are | AKKDISFYMPVDNLGMAVIDWEEWRPT |
| | | substituted from SEQ | WARNWKPKDVYKNRSIELVQQQNVQLS |
| | | ID NO: 3, cleavage | ATEATDKAKQEFEKAGKDFLVETIKLGK |
| | | occurs before F38 | LLRPNHLWGYYLFPDCYNHHYKKPGYN |
| | | amino acid residue at | GSCFNVEIKRNDDLSWLWNESTALYPSIY |
| | | N-terminus of PH20, | LNTNQSPVAATLYVRNRVREAIRVSKLPD |
| | | and cleavage occurs | AKSPLPVFAYTRIVFTDQALKFLSQDELV |
| | | after F468 amino acid | YTFGETVALGASGIVIWGSWENTRTMES |
| | | residue at C-terminus | CQAIKEYMDTTLNPYIINVTLAAKMCSQV |
| | | of PH20. | LCQEQGVCIRKNWNSSDYLHLNPDNFAI |
| | | | QLEKGGKFTVRGKPTLEDLEQFSEKFYCS |
| | | | CYSTLSCKEKADVKDDDAVDVCIADGVC |
| | | | IDAF |
| HM280 | 314 | 9 amino acid residues | FRAPPVIPNVPFLWAWNAPSEFCLGKFDE |
| | | T132S, L181A, E186D, | PLDMSLFSFIGSPRINATGQGVTIFYVDRL |
| | | Q268N, I291L, V312A, | GYYPYIDSITGVTVNGGIPQKISLQDHLDK |
| | | T452D, N344I, and | AKKDISFYMPVDNLGMAVIDWEEWRPT |
| | | K348M are substituted | WARNWKPKDVYKNRSIELVQQQNVQLS |
| | | from SEQ ID NO: 3, | ATEATDKAKQEFEKAGKDFLVETIKLGK |
| | | cleavage occurs before | LLRPNHLWGYYLFPDCYNHHYKKPGYN |
| | | F38 amino acid residue | GSCFNVEIKRNDDLSWLWNESTALYPSIY |
| | | at N-terminus of PH20, | LNTNQSPVAATLYVRNRVREAIRVSKLPD |
| | | and cleavage occurs | AKSPLPVFAYTRIVFTDQALKFLSQDELV |
| | | after F468 amino acid | YTFGETVALGASGIVIWGSWEITRTMESC |
| | | residue at C-terminus | QAIKEYMDTTLNPYIINVTLAAKMCSQVL |
| | | of PH20. | CQEQGVCIRKNWNSSDYLHLNPDNFAIQ |
| | | | LEKGGKFTVRGKPTLEDLEQFSEKFYCSC |
| | | | YSTLSCKEKADVKDDDAVDVCIADGVCI |
| | | | DAF |
| HM287 | 315 | 17 amino acid residues | FRAPPVIPNVPFLWAWNAPSEFCLGKFDE |
| | | T132A, L181A, | PLDMSLFSFIGSPRINATGQGVTIFYVDRL |
| | | E186A, Q268A, I291L, | GYYPYIDSITGVTVNGGIPQKISLQDHLDK |
| | | V312A, S341D, | AKKDIAFYMPVDNLGMAVIDWEEWRPT |
| | | W342L, E343S, N344I, | WARNWKPKDVYKNRSIELVQQQNVQLS |
| | | T345S, R346S, | ATEATAKAKQEFEKAGKDFLVETIKLGK |
| | | K348M, K355D, | LLRPNHLWGYYLFPDCYNHHYKKPGYN |
| | | D359E, T361I, and | GSCFNVEIKRNDDLSWLWNESTALYPSIY |
| | | T452D are substituted | LNTAQSPVAATLYVRNRVREAIRVSKLPD |
| | | from SEQ ID NO: 3, | AKSPLPVFAYTRIVFTDQALKFLSQDELV |
| | | cleavage occurs before | YTFGETVALGASGIVIWGDLSISSTMESC |
| | | F38 amino acid residue | QAIDEYMETILNPYIINVTLAAKMCSQVL |
| | | at N-terminus of PH20, | CQEQGVCIRKNWNSSDYLHLNPDNFAIQ |
| | | and cleavage occurs | LEKGGKFTVRGKPTLEDLEQFSEKFYCSC |
| | | after F468 amino acid | YSTLSCKEKADVKDDDAVDVCIADGVCI |
| | | residue at C-terminus | DAF |
| | | of PH20. | |
| HM288 | 316 | 16 amino acid residues | FRAPPVIPNVPFLWAWNAPSEFCLGKFDE |
| | | T132A, L181A, | PLDMSLFSFIGSPRINATGQGVTIFYVDRL |
| | | E186A, Q268A, I291L, | GYYPYIDSITGVTVNGGIPQKISLQDHLDK |
| | | V312A, S341D, | AKKDIAFYMPVDNLGMAVIDWEEWRPT |
| | | W342L, E343S, N344I, | WARNWKPKDVYKNRSIELVQQQNVQLS |
| | | T345S, K348M, | ATEATAKAKQEFEKAGKDFLVETIKLGK |
| | | K355D, D359E, T361I | LLRPNHLWGYYLFPDCYNHHYKKPGYN |
| | | and T452D are | GSCFNVEIKRNDDLSWLWNESTALYPSIY |
| | | substituted from SEQ | LNTAQSPVAATLYVRNRVREAIRVSKLPD |
| | | ID NO: 3, cleavage | AKSPLPVFAYTRIVFTDQALKFLSQDELV |
| | | occurs before F38 | YTFGETVALGASGIVIWGDLSISRTMESC |
| | | amino acid residue at | QAIDEYMETILNPYIINVTLAAKMCSQVL |
| | | N-terminus of PH20, | CQEQGVCIRKNWNSSDYLHLNPDNFAIQ |
| | | and cleavage occurs | LEKGGKFTVRGKPTLEDLEQFSEKFYCSC |
| | | after F468 amino acid | YSTLSCKEKADVKDDDAVDVCIADGVCI |
| | | residue at C-terminus | DAF |
| | | of PH20. | |

### Example 2. Characterization of PH20 Variants According to Present Invention

[0125] Further study on the structure and function of the protein was conducted through research on variants including the cleavage at the N-terminal and C-terminal based on the amino acid sequence of SEQ ID NO: 3. As a result of the expression amount and activity analysis of the prepared variant, the aggregation temperature is shown in Table 7.

[0126] Expression level and specific activity were analyzed by the turbidimetric assay described in Example 1. The results of the assay are shown. At this time, activity in the culture solution exceeding 300 unit/mL was marked as “>LOQ”, and activity after purification exceeding 15 unit/μg was marked as “>LOQ” based on the limit of quantification (LOQ) set for each of the activity in the culture solution and the activity after purification. In the opposite case, the inequality sign was changed. The expression level and limits of quantification (LOQ) of the activity analysis, and test results based thereon are shown in Table 7. The aggregation temperature of wild-type PH20 (L36-Y482) of SEQ ID NO: 1 is 46.5° C., and the aggregation temperature of the PH20 variant (F38-F468) of SEQ ID NO: 3 is 51° C.

TABLE 7
Expression level, specific activity, and aggregation
temperature of PH20 variants according to present invention

| | | | | Expression | Specific | |
|---|---|---|---|---|---|---|
| | Change from | | | level | activity | Aggrega- |
| | Sequence ID NO. 3 | | | (LOQ: | (LOQ: | tion |
| | Amino Acid | Start | End | 300 | 15 | point |
| Variants | substitution | from | with | units/mL) | units/μg) | (° C.) |
| HM63 | R346M | F38 | F468 | >LOQ | >LOQ | 52° C. |
| HM64 | T347Q | F38 | F468 | >LOQ | >LOQ | 50° C. |
| HM65 | K348Q | F38 | F468 | >LOQ | >LOQ | 51° C. |
| HM66 | S350Q | F38 | F468 | >LOQ | >LOQ | 56° C. |
| HM67 | K355Q | F38 | F468 | >LOQ | >LOQ | 50° C. |
| HM69 | M358V | F38 | F468 | >LOQ | >LOQ | 50° C. |
| HM70 | L362A | F38 | F468 | >LOQ | >LOQ | 48° C. |
| HM71 | E343V | F38 | F468 | >LOQ | >LOQ | 50° C. |
| HM72 | N344F | F38 | F468 | >LOQ | >LOQ | 52° C. |
| HM73 | D359K | F38 | F468 | >LOQ | >LOQ | 50° C. |
| HM74 | T360Y | F38 | F468 | >LOQ | >LOQ | 50° C. |
| HM75 | T361M | F38 | F468 | >LOQ | >LOQ | 49° C. |
| HM76 | Q352E | F38 | F468 | >LOQ | >LOQ | 52° C. |
| HM77 | N363M | F38 | F468 | >LOQ | >LOQ | 58° C. |
| HM78 | T84N | F38 | F468 | >LOQ | >LOQ | 48° C. |
| HM79 | N166K | F38 | F468 | >LOQ | >LOQ | 49° C. |
| HM82 | I354E | F38 | F468 | >LOQ | >LOQ | 49° C. |
| HM83 | I354Q | F38 | F468 | >LOQ | >LOQ | 49° C. |
| HM84 | I354S | F38 | F468 | >LOQ | >LOQ | 48° C. |
| HM85 | I354V | F38 | F468 | >LOQ | >LOQ | 51° C. |
| HM86 | I354A | F38 | F468 | >LOQ | >LOQ | 49° C. |
| HM88 | I354N | F38 | F468 | >LOQ | >LOQ | 49° C. |
| HM89 | I354T | F38 | F468 | >LOQ | >LOQ | 49° C. |
| HM90 | E356M | F38 | F468 | >LOQ | >LOQ | 50° C. |
| HM91 | E356F | F38 | F468 | >LOQ | >LOQ | 49° C. |
| HM92 | E356I | F38 | F468 | >LOQ | >LOQ | 49° C. |
| HM93 | E356L | F38 | F468 | >LOQ | >LOQ | 49° C. |
| HM94 | E356Q | F38 | F468 | >LOQ | >LOQ | 50° C. |
| HM95 | E356V | F38 | F468 | >LOQ | >LOQ | 48° C. |
| HM96 | N166K, E343V, | F38 | F468 | >LOQ | >LOQ | 48° C. |
| | T361M | | | | | |
| HM97 | G340Q | F38 | F468 | >LOQ | >LOQ | 50° C. |
| HM98 | S341H | F38 | F468 | >LOQ | >LOQ | 51° C. |
| HM99 | W342I | F38 | F468 | >LOQ | >LOQ | 51° C. |
| HM100 | E343Y | F38 | F468 | >LOQ | >LOQ | 50° C. |
| HM101 | T345E | F38 | F468 | >LOQ | >LOQ | 51° C. |
| HM102 | R346F | F38 | F468 | >LOQ | >LOQ | 51° C. |
| HM103 | T347E | F38 | F468 | >LOQ | >LOQ | 50° C. |
| HM104 | E349L | F38 | F468 | >LOQ | >LOQ | 50° C. |
| HM105 | S350I | F38 | F468 | >LOQ | >LOQ | 50° C. |
| HM106 | Q352G | F38 | F468 | >LOQ | >LOQ | 49° C. |
| HM107 | I354R | F38 | F468 | >LOQ | >LOQ | 48° C. |
| HM110 | M358R | F38 | F468 | >LOQ | >LOQ | 48° C. |
| HM111 | D359V | F38 | F468 | >LOQ | >LOQ | 50° C. |
| HM112 | T360R | F38 | F468 | >LOQ | >LOQ | 52° C. |
| HM114 | T345K | F38 | F468 | >LOQ | >LOQ | 50° C. |
| HM115 | R346L | F38 | F468 | >LOQ | >LOQ | 52° C. |
| HM116 | T347V | F38 | F468 | >LOQ | >LOQ | 49° C. |
| HM117 | E349W | F38 | F468 | >LOQ | >LOQ | 49° C. |
| HM118 | I354W | F38 | F468 | >LOQ | >LOQ | 51° C. |
| HM121 | D359Y | F38 | F468 | >LOQ | >LOQ | 49° C. |
| HM125 | T347W | F38 | F468 | >LOQ | >LOQ | 51° C. |
| HM126 | Y357W | F38 | F468 | >LOQ | >LOQ | 55° C. |
| HM130 | W342D | F38 | F468 | >LOQ | >LOQ | 51° C. |
| HM131 | E343Q | F38 | F468 | >LOQ | >LOQ | 50° C. |
| HM132 | T347H | F38 | F468 | >LOQ | >LOQ | 51° C. |
| HM133 | K348F | F38 | F468 | >LOQ | >LOQ | 49° C. |
| HM134 | S350D | F38 | F468 | >LOQ | >LOQ | 54° C. |
| HM135 | Q352Y | F38 | F468 | >LOQ | >LOQ | 51° C. |
| HM136 | A353E | F38 | F468 | >LOQ | >LOQ | 49° C. |
| HM138 | M358Y | F38 | F468 | >LOQ | >LOQ | 48° C. |
| HM139 | D359Q | F38 | F468 | >LOQ | >LOQ | 50° C. |
| HM140 | T360L | F38 | F468 | >LOQ | >LOQ | 49° C. |
| HM141 | T361E | F38 | F468 | >LOQ | >LOQ | 48° C. |
| HM142 | N363E | F38 | F468 | >LOQ | >LOQ | 50° C. |
| HM143 | W342H | F38 | F468 | >LOQ | >LOQ | 50° C. |
| HM144 | K348D | F38 | F468 | >LOQ | >LOQ | 50° C. |
| HM145 | T361H | F38 | F468 | >LOQ | >LOQ | 49° C. |
| HM146 | — | R39 | F468 | >LOQ | >LOQ | 52° C. |
| HM147 | — | A40 | F468 | >LOQ | >LOQ | 53° C. |
| HM149 | — | F38 | D456 | >LOQ | >LOQ | 54° C. |
| HM150 | S350Q, T360R | R39 | F468 | >LOQ | >LOQ | 50° C. |
| HM152 | D65A | F38 | F468 | >LOQ | >LOQ | 51° C |
| HM153 | E66A | F38 | F468 | >LOQ | >LOQ | 51° C. |
| HM154 | P67A | F38 | F468 | >LOQ | >LOQ | 50° C. |
| HM155 | L68A | F38 | F468 | >LOQ | >LOQ | 51° C. |
| HM156 | Q311A | F38 | F 468 | >LOQ | >LOQ | 50° C. |
| HM157 | V312A | F38 | F468 | >LOQ | >LOQ | 56° C. |
| HM158 | L313A | F38 | F468 | >LOQ | >LOQ | 55° C. |
| HM159 | K314A | F38 | F468 | >LOQ | >LOQ | 49° C. |
| HM160 | N266A | F38 | F468 | >LOQ | >LOQ | 49° C. |
| HM161 | T267A | F38 | F468 | >LOQ | >LOQ | 50° C. |
| HM162 | Q268A | F38 | F468 | >LOQ | >LOQ | 51° C. |
| HM163 | Q269A | F38 | F468 | >LOQ | >LOQ | 51° C. |
| HM164 | P271A | F38 | F468 | >LOQ | >LOQ | 51° C. |
| HM165 | V272A | F38 | F468 | >LOQ | >LOQ | 52° C. |
| HM166 | I102A | F38 | F468 | >LOQ | >LOQ | 49° C. |
| HM167 | D103A | F38 | F468 | >LOQ | >LOQ | 53° C. |
| HM168 | S104A | F38 | F468 | >LOQ | >LOQ | 51° C. |
| HM169 | I105A | F38 | F468 | >LOQ | >LOQ | 51° C. |
| HM170 | T132A | F38 | F468 | >LOQ | >LOQ | 51° C. |
| HM171 | F133A | F38 | F468 | >LOQ | >LOQ | 50° C. |
| HM172 | Y134A | F38 | F468 | >LOQ | >LOQ | 52° C. |
| HM173 | V241A | F38 | F468 | >LOQ | >LOQ | 50° C. |
| HM174 | E242A | F38 | F468 | <LOQ | >LOQ | 55° C. |
| HM175 | I243A | F38 | F468 | >LOQ | >LOQ | 49° C. |
| HM176 | K244A | F38 | F468 | >LOQ | >LOQ | 50° C. |
| HM177 | L179A | F38 | F468 | >LOQ | >LOQ | 54° C. |
| HM178 | S180A | F38 | F468 | >LOQ | >LOQ | 50° C. |
| HM179 | L181A | F38 | F468 | >LOQ | >LOQ | 50° C. |
| HM180 | T182A | F38 | F468 | >LOQ | >LOQ | 50° C. |
| HM181 | T185A | F38 | F468 | >LOQ | >LOQ | 50° C. |
| HM182 | E186A | F38 | F468 | >LOQ | >LOQ | 51° C. |
| HM183 | K187A | F38 | F468 | >LOQ | >LOQ | 50° C. |
| HM184 | K290A | F38 | F468 | >LOQ | >LOQ | 50° C. |
| HM185 | I291A | F38 | F468 | >LOQ | >LOQ | 54° C. |
| HM186 | P292A | F38 | F468 | >LOQ | >LOQ | 52° C. |
| HM190 | L441A | F38 | F468 | >LOQ | >LOQ | 50° C. |
| HM191 | S442A | F38 | F468 | >LOQ | >LOQ | 54° C. |
| HM192 | D451A | F38 | F468 | >LOQ | >LOQ | 54° C. |
| HM193 | T452A | F38 | F468 | >LOQ | >LOQ | 53° C. |
| HM194 | D453A | F38 | F468 | >LOQ | >LOQ | 49° C. |
| HM195 | D461A | F38 | F468 | >LOQ | >LOQ | 49° C. |
| HM196 | G462A | F38 | F468 | >LOQ | >LOQ | 50° C. |
| HM197 | V463A | F38 | F468 | >LOQ | >LOQ | 49° C. |
| HM198 | N82A | F38 | F468 | >LOQ | >LOQ | 49° C. |
| HM199 | N166A | F38 | F468 | >LOQ | >LOQ | 50° C. |
| HM203 | S104N | F38 | F468 | >LOQ | >LOQ | 48° C. |
| HM204 | I105Q | F38 | F468 | >LOQ | >LOQ | 51° C. |
| HM205 | Q268D | F38 | F468 | >LOQ | >LOQ | 55° C. |
| HM208 | Q268I | F38 | F468 | <LOQ | >LOQ | 52° C. |
| HM210 | I291G | F38 | F468 | <LOQ | >LOQ | 55° C. |
| HM211 | P292D | F38 | F468 | <LOQ | >LOQ | 53° C. |
| HM212 | T452D | F38 | F468 | >LOQ | >LOQ | 50° C. |
| HM213 | T452H | F38 | F468 | >LOQ | >LOQ | 50° C. |
| HM214 | T452K | F38 | F468 | >LOQ | >LOQ | 52° C. |
| HM216 | T452G | F38 | F468 | >LOQ | >LOQ | 54° C. |
| HM217 | T452P | F38 | F468 | >LOQ | >LOQ | 52° C. |
| HM218 | T452M | F38 | F468 | >LOQ | >LOQ | 52° C. |
| HM219 | T452F | F38 | F468 | >LOQ | >LOQ | 53° C. |
| HM220 | D461R | F38 | F468 | >LOQ | >LOQ | 48° C. |
| HM231 | V463Y | F38 | F468 | >LOQ | >LOQ | 51° C. |
| HM232 | S180T | F38 | F468 | >LOQ | >LOQ | 51° C. |
| HM233 | D451S | F38 | F468 | >LOQ | >LOQ | 51° C. |
| HM234 | L313P | F38 | F468 | >LOQ | >LOQ | 49° C. |
| HM235 | L313M | F38 | F468 | >LOQ | >LOQ | 52° C. |
| HM243 | L179S | F38 | F468 | >LOQ | >LOQ | 52° C. |
| HM245 | L179I | F38 | F468 | >LOQ | >LOQ | 48° C. |
| HM246 | L179F | F38 | F468 | >LOQ | >LOQ | 55° C. |
| HM254 | N344F, K348Q, | F38 | F468 | >LOQ | >LOQ | 53° C. |
| | K355Q | | | | | |
| HM261 | T132S, L181A, | F38 | F468 | >LOQ | >LOQ | 56° C. |
| | E186D, Q268N, | | | | | |
| | I291L, V312A, | | | | | |
| | T452D | | | | | |
| HM262 | — | N37 | F468 | >LOQ | >LOQ | 50° C. |
| HM263 | — | L36 | F468 | >LOQ | >LOQ | 49° C. |
| HM266 | R39K, I105A, | F38 | F468 | >LOQ | >LOQ | 57° C. |
| | T132S, L181M, | | | | | |
| | E186D, Q268A, | | | | | |
| | I291L, V312A, | | | | | |
| | T452D | | | | | |
| HM268 | T132A, L181A, | F38 | F468 | >LOQ | >LOQ | 53° C. |
| | E186A, Q268A, | | | | | |
| | I291L, V312A, | | | | | |
| | T452D | | | | | |
| HM271 | N344I, K348M | F38 | F468 | >LOQ | >LOQ | 51° C. |
| HM275 | S341D, W342L, | F38 | F468 | >LOQ | >LOQ | 48° C. |
| | E343S, N344I, | | | | | |
| | T345S, R346S, | | | | | |
| | K348M, K355D, | | | | | |
| | D359E, T361I | | | | | |
| HM276 | S341D, W342L, | F38 | F468 | >LOQ | >LOQ | 48° C. |
| | E343S, N344I, | | | | | |
| | T345S, K348M, | | | | | |
| | K355D, D359E, | | | | | |
| | T361I | | | | | |
| HM279 | T132S, L181A, | F38 | F468 | >LOQ | >LOQ | 56° C. |
| | E186D, Q268N, | | | | | |
| | I291L, V312A, | | | | | |
| | K348M, T452D | | | | | |
| HM280 | T132S, L181A, | F38 | F468 | <LOQ | >LOQ | 59° C. |
| | E186D, Q268N, | | | | | |
| | I291L, V312A, | | | | | |
| | N344I, K348M, | | | | | |
| | T452D | | | | | |
| HM287 | T132A, L181A, | F38 | F468 | <LOQ | >LOQ | 48° C. |
| | E186A, Q268A, | | | | | |
| | I291L, V312A, | | | | | |
| | S341D, W342L, | | | | | |
| | E343S, N344I, | | | | | |
| | T345S, R346S, | | | | | |
| | K348M, K355D, | | | | | |
| | D359E, T361I, | | | | | |
| | T452D | | | | | |
| HM288 | T132A, L181A, | F38 | F468 | <LOQ | >LOQ | 48° C. |
| | E186A, Q268A, | | | | | |
| | I291L, V312A, | | | | | |
| | S341D, W342L, | | | | | |
| | E343S, N344I, | | | | | |
| | T345S, K348M, | | | | | |
| | K355D, D359E, | | | | | |
| | T361I, T452D | | | | | |

[0127] As can be seen from Table 7 above, among the variants having the amino acid sequence of SEQ ID NO: 3, a total of 133 types of variants having one amino acid residue substitution, namely, HM63, HM64, HM65, HM66, HM67, HM69, HM70, HM71, HM72, HM73, HM74, HM75, HM76, HM77, HM78, HM79, HM82, HM83, HM84, HM85, HM86, HM88, HM89, HM90, HM91, HM92, HM93, HM94, HM95, HM97, HM98, HM99, HM100, HM101, HM102, HM103, HM104, HM105, HM106, HM107, HM110, HM111, HM112, HM114, HM115, HM116, HM117, HM118, HM121, HM125, HM126, HM130, HM131, HM132, HM133, HM134, HM135, HM136, HM138, HM139, HM140, HM141, HM142, HM143, HM144, HM145, HM152, HM153, HM154, HM155, HM156, HM157, HM158, HM159, HM160, HM161, HM162, HM163, HM164, HM165, HM166, HM167, HM168, HM169, HM170, HM171, HM172, HM173, HM174, HM175, HM176, HM177, HM178, HM179, HM180, HM181, HM182, HM183, HM184, HM185, HM186, HM190, HM191, HM192, HM193, HM194, HM195, HM196, HM197, HM198, HM199, HM203, HM204, HM205, HM208, HM210, HM211, HM212, HM213, HM214, HM216, HM217, HM218, HM219, HM220, HM231, HM232, HM233, HM234, HM235, HM243, HM245 and HM246, were variants that still maintain the activity in the purified fraction obtained after purification and have an aggregation temperature of 48 to 58° C. and thus exhibit excellent thermal stability. Thereamong, a total of 65 types of variants, namely HM63, HM64, HM65, HM66, HM67, HM69, HM70, HM71, HM72, HM73, HM74, HM75, HM76, HM77, HM78, HM79, HM82, HM83, HM84, HM85, HM86, HM88, HM89, HM90, HM91, HM92, HM93, HM94, HM95, HM98, HM99, HM100, HM101, HM102, HM103, HM104, HM105, HM106, HM107, HM110, HM111, HM112, HM114, HM115, HM116, HM117, HM118, HM121, HM125, HM126, HM130, HM131, HM132, HM133, HM134, HM135, HM136, HM138, HM139, HM140, HM141, HM142, HM143, HM144 and HM145, are variants that are mutated at one of substitution sites in the sequence of SEQ ID NO: 3 from PH20, and have an aggregation temperature of 48° C. to 58° C. There among, a total of 68 types of variants, namely HM97, HM152, HM153, HM154, HM155, HM156, HM157, HM158, HM159, HM160, HM161, HM162, HM163, HM164, HM165, HM166, HM167, HM168, HM169, HM170, HM171, HM172, HM173, HM174, HM175, HM176, HM177, HM178, HM179, HM180, HM181, HM182, HM183, HM184, HM185, HM186, HM190, HM191, HM192, HM193, HM194, HM195, HM196, HM197, HM198, HM199, HM203, HM204, HM205, HM208, HM210, HM211, HM212, HM213, HM214, HM216, HM217, HM218, HM219, HM220, HM231, HM232, HM233, HM234, HM235, HM243, HM245 and HM246, are variants that are mutated at one position of sites other than the substitution sites in SEQ ID NO: 3 from PH20, and have an aggregation temperature of 48° C. to 56° C.

[0128] As a result, it can be seen that the variant having substitution at one position from SEQ ID NO: 3 has a higher aggregation temperature than that of wild-type PH20 (L36-Y482) of SEQ ID NO: 1, regardless of the substitution position. However, among them, HM174, HM208, HM210 and HM211 were found to have lower activity in the culture solution than 300 unit/mL, which is LOQ, but have higher activity after purification than 15 unit/μg, which is LOQ. In this case, it is considered that the characteristics of the variant itself cannot be accurately analyzed when the activity of the variant is measured only in the culture solution.

[0129] In addition, as shown in Table 7 above, among the variants having the amino acid sequence of SEQ ID NO: 3, HM146, HM147, HM149, HM262 and HM263 retain the same mutations as the variant having the amino acid sequence of SEQ ID NO: 3, that is, substitution of amino acid residues, but further include cleavage at the N-terminus and the C-terminus, which means that the expression and activity of proteins in the variants having the amino acid sequence of SEQ ID NO: 3 are not affected by further cleavage at the N-terminus and the C-terminus. These variants have an aggregation temperature of 49° C. to 53° C., which is not very different from that of the variant of SEQ ID NO: 3, which means that the physical properties of the variants were also unaffected by further cleavage at the N-terminus and the C-terminus.

[0130] In addition, in the variants having the amino acid sequence of SEQ ID NO: 3, a total of 13 types of variants, namely HM96, HM150, HM254, HM261, HM266, HM268, HM271, HM275, HM276, HM279, HM280, HM287 and HM288, which are variants including one or more amino acid substitutions and cleavages among those listed in Table 7 above, successfully expressed proteins, further retained enzyme activity, and had an aggregation temperature of 48° C. to 59° C. This means that even in the case of such multiple substitutions, the activity and physical properties of proteins were maintained. However, multiple substitutions exhibited unpredictable enzymatic activity and aggregation temperature which are unpredictable only with the combination of characteristics that are obtained in each single substitution constituting the same.

### Example 3. Analysis of Activity of Variants Substituted with Sequences of Hyal2, Hyal3, and Hyal4

[0131] The amino acid sequences of Hyal2 (TTSTETCQYLKDYLTRL), Hyal3 (SSSEEECWHLHDYLVDT), and Hyal4 (TASKANCTKVKQFVSSD), which are the corresponding parts of hyaluronidases present in humans, other than Hyal1, in place of M345 to I361 sites in the amino acid sequence of the wild-type PH20 of SEQ ID NO: 1, were introduced into the M345 to I361 sites to investigate how the stability of proteins changes.

[0132] The variants constructed by substituting the M345 to I361 sites of mature wild-type PH20 (L36-S490) with corresponding sequences of Hyal2, Hyal3, and Hyal4, are referred to as “Hyal2-variant”, “Hyal3-variant” and “Hyal4-variant”, respectively.

[0133] The Hyal2-variant, Hyal3-variant and Hyal4-variant were constructed, and then the thermal stability of these variants was analyzed (see FIG. 2). As a result, the aggregation temperature of the Hyal3-variant measured by DLS was 48° C., which was 1.5° C. higher than 46.5° C., which is the aggregation temperature of the wild-type PH20, which means that the thermal stability was increased.

[0134] In addition, in order to confirm whether or not these variants were expressed in ExpiCHO cell culture, the variants were purified by the same method using a HisTrap column, and the expression levels of proteins were compared by SDS-PAGE analysis. The result showed that the expression level of the Hyal3-variant was the highest, followed by the Hyal2-variant and Hyal4-variant in descending order.

### Example 4. Analysis of Thermal Stability of Variants According to Present Invention

[0135] SDS-PAGE analysis was performed to confirm the thermal stability of the variants according to the present invention. The purified wild-type PH20 of SEQ ID NO: 1 (L36-Y482) and the purified protein of SEQ ID NO: 3 (F38-F468) of the PH20 variants according to the present invention were stored at 42° C. for 7 days, followed by 10% SDS-PAGE analysis under reducing and non-reducing conditions (FIG. 4).

[0136] As a result, wild-type PH20 (L36-Y482) was observed to aggregate (Lane G in FIG. 4), whereas variant PH20 (F38-F468) of SEQ ID NO: 3 did not aggregate (Lane H in FIG. 4). This difference in aggregation was found to be due to the difference in aggregation temperature between the two proteins. Accordingly, the variant according to the present invention was considered to exhibit higher thermal stability and thus is expected to be widely industrially applicable due to the high aggregation temperature thereof compared to the wild-type PH20.

### Example 5. Enzyme Kinetics Analysis of Variants According to Present Invention

[0137] In order to analyze the enzyme kinetics of the variants according to the present invention, the enzyme activity was measured by the Morgan-Elson method (Takahashi, T. et al (2003) Anal. Biochem. 322:257-263). The Morgan-Elson method is a colorimetric method that assays red substances (at 545 nm) produced by the reaction of the reducing end of N-acetyl-D-glucosamine (GlcNAc) produced upon hydrolysis of hyaluronic acid by hyaluronidase with para-dimethylaminobenzaldehyde (DMAB), which is an Ehrlich's Reagent. N-acetyl-D-glucosamine (GlcNAc, Sigma) diluted to 0.25, 0.50, 0.75, 1.00 or 1.25 mM in dilution buffer solution (0.1 M NaPi, 0.1 M NaCl, 1.5 mM saccharic acid 1,4-lactone, pH 5.35) was reduced by treatment with tetraborate in each test tube, and then DMAB was added to induce colorimetric reaction. After the reaction, absorbance was measured at 545 nm to create a standard reaction curve for GlcNAc. Hyaluronic acid as a substrate was diluted to 0.54, 0.65, 0.87, 1.23 or 2.17 μM in a dilution buffer solution in each test tube, and hyaluronidase was added thereto, followed by reaction at 37° C. for 5 minutes and heating at 100° C. for 5 minutes to terminate the enzyme reaction. The resultant sample after enzyme reaction was reduced by treatment with tetraborate, and DMAB was added to induce colorimetric reaction. After the reaction, absorbance was measured at 545 nm, and enzyme activity was measured using the standard reaction curve of GlcNAc above. The enzyme kinetics of the wild-type PH20 of SEQ ID NO: 1 and the PH20 variant according to the present invention were analyzed using this method. As a result, the linearity of the Lineweaver-Burk curve was detected, which means that the PH20 variant according to the present invention follows the Michaelis-Menten enzyme kinetics equation.

Table 8 shows Vₘₐₓ (maximum enzyme reaction rate), K_{M} (50% substrate concentration), k_{cat} (substrate conversion rate), and k_{cat}/K_{M} (enzyme catalyst efficiency) obtained as the result of analysis of enzyme kinetics regarding wild-type PH20 (L36-Y482) of SEQ ID NO: 1, variant PH20 (F38-F468) of SEQ ID NO: 3, HM261, and HM268. It can be seen that, as the value of K_{M} decreases, the substrate-binding capacity of the enzyme increases, and as the value of k_{cat} increases, the substrate conversion rate of the enzyme increases, so k_{cat}/K_{M} (enzyme catalyst efficiency) of each PH20 variant is higher than that of the wild-type PH20. In addition, the k_{cat} of each of SEQ ID NO: 3, HM261 and HM268 is greater than that of the wild-type PH20 of SEQ ID NO: 1, and thus the substrate conversion rate of the enzyme is larger than that of the wild-type PH20 of SEQ ID NO: 1, so the industrial availability of each PH20 variant is greater than that of the wild-type PH20.

TABLE 8
Results of enzyme kinetics analysis of PH
20 variants according to present invention

| | Vₘₐₓ | K_{M} | k_{cat} | |
|---|---|---|---|---|
| | (μM/sec) | (μM) | (1/sec) | k_{cat}/ K_{M} |
| PH20 | 4.5 ± 0.5 | 2.0 ± 0.3 | 30.6 ± 3.0 | 15.1 ± 1.1 |
| SEQ ID NO: 1 | | | | |
| (L36-Y482) | | | | |
| SEQ ID NO: 3 | 3.7 ± 0.3 | 1.3 ± 0.0 | 47.6 ± 3.7 | 36.8 ± 2.0 |
| (F38-F468) | | | | |
| HM261 | 5.2 ± 0.5 | 1.4 ± 0.2 | 33.9 ± 3.0 | 23.7 ± 2.2 |
| HM268 | 2.9 ± 0.5 | 0.9 ± 0.2 | 37.1 ± 6.4 | 40.0 ± 3.4 |

The application's sequence listing, which the Patent Office published only in electronic form, follows.

SEQUENCE LISTING (316 sequences)

SEQ ID NO: 1 - protein, 509 aa, Artificial Sequence
  Synthetic Construct
MGVLKFKHIFFRSFVKSSGVSQIVFTFLLIPCCLTLNFRAPPVIPNVPFLWAWNAPSEFCLGKFDEPLDMSLFSFIGSPRINATGQGVTIFYVDRLGYYPYIDSITGVTVNGGIPQKISLQDHLDKAKKDITFYMPVDNLGMAVIDWEEWRPTWARNWKPKDVYKNRSIELVQQQNVQLSLTEATEKAKQEFEKAGKDFLVETIKLGKLLRPNHLWGYYLFPDCYNHHYKKPGYNGSCFNVEIKRNDDLSWLWNESTALYPSIYLNTQQSPVAATLYVRNRVREAIRVSKIPDAKSPLPVFAYTRIVFTDQVLKFLSQDELVYTFGETVALGASGIVIWGTLSIMRSMKSCLLLDNYMETILNPYIINVTLAAKMCSQVLCQEQGVCIRKNWNSSDYLHLNPDNFAIQLEKGGKFTVRGKPTLEDLEQFSEKFYCSCYSTLSCKEKADVKDTDAVDVCIADGVCIDAFLKPPMETEEPQIFYNASPSTLSATMFIVSILFLIISSVASL

SEQ ID NO: 2 - protein, 435 aa, Artificial Sequence
  Synthetic Construct
MAAHLLPICALFLTLLDMAQGFRGPLLPNRPFTTVWNANTQWCLERHGVDVDVSVFDVVANPGQTFRGPDMTIFYSSQLGTYPYYTPTGEPVFGGLPQNASLIAHLARTFQDILAAIPAPDFSGLAVIDWEAWRPRWAFNWDTKDIYRQRSRALVQAQHPDWPAPQVEAVAQDQFQGAARAWMAGTLQLGRALRPRGLWGFYGFPDCYNYDFLSPNYTGQCPSGIRAQNDQLGWLWGQSRALYPSIYMPAVLEGTGKSQMYVQHRVAEAFRVAVAAGDPNLPVLPYVQIFYDTTNHFLPLDELEHSLGESAAQGAAGVVLWVSWENTRTKESCQAIKEYMDTTLGPFILNVTSGALLCSQALCSGHGRCVRRTSHPKALLLLNPASFSIQLTPGGGPLSLRGALSLEDQAQMAVEFKCRCYPGWQAPWCERKSMW

SEQ ID NO: 3 - protein, 509 aa, Artificial Sequence
  Synthetic Construct
MGVLKFKHIFFRSFVKSSGVSQIVFTFLLIPCCLTLNFRAPPVIPNVPFLWAWNAPSEFCLGKFDEPLDMSLFSFIGSPRINATGQGVTIFYVDRLGYYPYIDSITGVTVNGGIPQKISLQDHLDKAKKDITFYMPVDNLGMAVIDWEEWRPTWARNWKPKDVYKNRSIELVQQQNVQLSLTEATEKAKQEFEKAGKDFLVETIKLGKLLRPNHLWGYYLFPDCYNHHYKKPGYNGSCFNVEIKRNDDLSWLWNESTALYPSIYLNTQQSPVAATLYVRNRVREAIRVSKIPDAKSPLPVFAYTRIVFTDQVLKFLSQDELVYTFGETVALGASGIVIWGSWENTRTKESCQAIKEYMDTTLNPYIINVTLAAKMCSQVLCQEQGVCIRKNWNSSDYLHLNPDNFAIQLEKGGKFTVRGKPTLEDLEQFSEKFYCSCYSTLSCKEKADVKDTDAVDVCIADGVCIDAFLKPPMETEEPQIFYNASPSTLSATMFIVSILFLIISSVASL

SEQ ID NO: 4 - protein, 26 aa, Artificial Sequence
  Synthetic Construct
MATGSRTSLLLAFGLLCLPWLQEGSA

SEQ ID NO: 5 - protein, 18 aa, Artificial Sequence
  Synthetic Construct
MKWVTFISLLFLFSSAYS

SEQ ID NO: 6 - protein, 21 aa, Artificial Sequence
  Synthetic Construct
MAAHLLPICALFLTLLDMAQG

SEQ ID NO: 7 - DNA, 93 bp, Artificial Sequence
  Synthetic Construct
atatggggaaccctcagtataactacaagcactgagacctgccaatatctgaaggattacctgaccagactgctgaatccttacataatcaac

SEQ ID NO: 8 - DNA, 93 bp, Artificial Sequence
  Synthetic Construct
atatggggaaccctcagtatatccagcagtgaggaagaatgctggcatttgcacgattacctggtagacacactgaatccttacataatcaac

SEQ ID NO: 9 - DNA, 93 bp, Artificial Sequence
  Synthetic Construct
atatggggaaccctcagtataaccgcatctaaggcaaactgcacaaaagtaaaacaattcgtctccagtgatctgaatccttacataatcaac

SEQ ID NO: 10 - DNA, 33 bp, Artificial Sequence
  Synthetic Construct
gaatatctcgaggccaccatgaagtgggttaca

SEQ ID NO: 11 - DNA, 55 bp, Artificial Sequence
  Synthetic Construct
ctaattgcggccgctcattagtggtgatggtgatgatggaagaaaccaattctgc

SEQ ID NO: 12 - DNA, 44 bp, Artificial Sequence
  Synthetic Construct
aattaggcggccgcctattaaaaggcgtcgatgcacacgccatc

SEQ ID NO: 13 - DNA, 64 bp, Artificial Sequence
  Synthetic Construct
ctctaattgcggccgctcattagtggtgatggtgatgatgaaaggcgtcgatgcacacgccatc

SEQ ID NO: 14 - DNA, 44 bp, Artificial Sequence
  Synthetic Construct
aattagagctcgaggccaccatgaaatgggtgacctttatctcc

SEQ ID NO: 15 - DNA, 28 bp, Artificial Sequence
  Synthetic Construct
cagattctcgaggccaccatgaaatggg

SEQ ID NO: 16 - DNA, 51 bp, Artificial Sequence
  Synthetic Construct
atctggggctcctgggagaacaccaggcagaaggagagctgccaggccatc

SEQ ID NO: 17 - DNA, 54 bp, Artificial Sequence
  Synthetic Construct
atctggggctcctgggagaacaccaggacccaggagagctgccaggccatcaag

SEQ ID NO: 18 - DNA, 44 bp, Artificial Sequence
  Synthetic Construct
agaacaccaggaccaaggagcaatgccaggccatcaaggagtac

SEQ ID NO: 19 - DNA, 44 bp, Artificial Sequence
  Synthetic Construct
aggagagctgccaggccatccaggagtacatggacacaaccctg

SEQ ID NO: 20 - DNA, 51 bp, Artificial Sequence
  Synthetic Construct
agctgccaggccatcaaggagtacgtggacacaaccctgaacccttatatc

SEQ ID NO: 21 - DNA, 42 bp, Artificial Sequence
  Synthetic Construct
aggagtacatggacacaaccgcgaacccttatatcatcaatg

SEQ ID NO: 22 - DNA, 44 bp, Artificial Sequence
  Synthetic Construct
atcgtgatctggggctcctgggtgaacaccaggaccaaggagag

SEQ ID NO: 23 - DNA, 41 bp, Artificial Sequence
  Synthetic Construct
atctggggctcctgggagttcaccaggaccaaggagagctg

SEQ ID NO: 24 - DNA, 51 bp, Artificial Sequence
  Synthetic Construct
agctgccaggccatcaaggagtacatgaaaacaaccctgaacccttatatc

SEQ ID NO: 25 - DNA, 42 bp, Artificial Sequence
  Synthetic Construct
atcaaggagtacatggactacaccctgaacccttatatcatc

SEQ ID NO: 26 - DNA, 42 bp, Artificial Sequence
  Synthetic Construct
atcaaggagtacatggacacaatgctgaacccttatatcatc

SEQ ID NO: 27 - DNA, 43 bp, Artificial Sequence
  Synthetic Construct
accaggaccaaggagagctgcgaggccatcaaggagtacatgg

SEQ ID NO: 28 - DNA, 43 bp, Artificial Sequence
  Synthetic Construct
agtacatggacacaaccctgatgccttatatcatcaatgtgac

SEQ ID NO: 29 - DNA, 46 bp, Artificial Sequence
  Synthetic Construct
tagaagattgtcacgccctggccgttggcattgatccgaggagagc

SEQ ID NO: 30 - DNA, 45 bp, Artificial Sequence
  Synthetic Construct
tgcaccagctcgatggaccgtttcttatacacgtccttaggcttc

SEQ ID NO: 31 - DNA, 45 bp, Artificial Sequence
  Synthetic Construct
accaaggagagctgccaggccgaaaaggagtacatggacacaacc

SEQ ID NO: 32 - DNA, 45 bp, Artificial Sequence
  Synthetic Construct
accaaggagagctgccaggcccaaaaggagtacatggacacaacc

SEQ ID NO: 33 - DNA, 45 bp, Artificial Sequence
  Synthetic Construct
accaaggagagctgccaggcctctaaggagtacatggacacaacc

SEQ ID NO: 34 - DNA, 45 bp, Artificial Sequence
  Synthetic Construct
accaaggagagctgccaggccgtcaaggagtacatggacacaacc

SEQ ID NO: 35 - DNA, 45 bp, Artificial Sequence
  Synthetic Construct
accaaggagagctgccaggccgcgaaggagtacatggacacaacc

SEQ ID NO: 36 - DNA, 45 bp, Artificial Sequence
  Synthetic Construct
accaaggagagctgccaggccaacaaggagtacatggacacaacc

SEQ ID NO: 37 - DNA, 45 bp, Artificial Sequence
  Synthetic Construct
accaaggagagctgccaggccaccaaggagtacatggacacaacc

SEQ ID NO: 38 - DNA, 48 bp, Artificial Sequence
  Synthetic Construct
aaggagagctgccaggccatcaagatgtacatggacacaaccctgaac

SEQ ID NO: 39 - DNA, 48 bp, Artificial Sequence
  Synthetic Construct
aaggagagctgccaggccatcaagttctacatggacacaaccctgaac

SEQ ID NO: 40 - DNA, 48 bp, Artificial Sequence
  Synthetic Construct
aaggagagctgccaggccatcaagatatacatggacacaaccctgaac

SEQ ID NO: 41 - DNA, 48 bp, Artificial Sequence
  Synthetic Construct
aaggagagctgccaggccatcaagttgtacatggacacaaccctgaac

SEQ ID NO: 42 - DNA, 48 bp, Artificial Sequence
  Synthetic Construct
aaggagagctgccaggccatcaagcagtacatggacacaaccctgaac

SEQ ID NO: 43 - DNA, 48 bp, Artificial Sequence
  Synthetic Construct
aaggagagctgccaggccatcaaggtatacatggacacaaccctgaac

SEQ ID NO: 44 - DNA, 96 bp, Artificial Sequence
  Synthetic Construct
atcgtgatctggggctcctgggtgaacaccaggaccaaggagagctgccaggccatcaaggagtacatggacacaatgctgaacccttatatcatc

SEQ ID NO: 45 - DNA, 46 bp, Artificial Sequence
  Synthetic Construct
agctagcggcatcgtgatctggcaatcctgggagaacaccaggacc

SEQ ID NO: 46 - DNA, 45 bp, Artificial Sequence
  Synthetic Construct
agcggcatcgtgatctggggccactgggagaacaccaggaccaag

SEQ ID NO: 47 - DNA, 48 bp, Artificial Sequence
  Synthetic Construct
agcggcatcgtgatctggggctccattgagaacaccaggaccaaggag

SEQ ID NO: 48 - DNA, 44 bp, Artificial Sequence
  Synthetic Construct
atcgtgatctggggctcctggtataacaccaggaccaaggagag

SEQ ID NO: 49 - DNA, 49 bp, Artificial Sequence
  Synthetic Construct
atcgtgatctggggctcctgggagaacgaaaggaccaaggagagctgcc

SEQ ID NO: 50 - DNA, 47 bp, Artificial Sequence
  Synthetic Construct
atctggggctcctgggagaacaccttcaccaaggagagctgccaggc

SEQ ID NO: 51 - DNA, 51 bp, Artificial Sequence
  Synthetic Construct
atctggggctcctgggagaacaccagggaaaaggagagctgccaggccatc

SEQ ID NO: 52 - DNA, 55 bp, Artificial Sequence
  Synthetic Construct
atctggggctcctgggagaacaccaggaccaagttgagctgccaggccatcaagg

SEQ ID NO: 53 - DNA, 41 bp, Artificial Sequence
  Synthetic Construct
agaacaccaggaccaaggagatctgccaggccatcaaggag

SEQ ID NO: 54 - DNA, 45 bp, Artificial Sequence
  Synthetic Construct
accaggaccaaggagagctgcggggccatcaaggagtacatggac

SEQ ID NO: 55 - DNA, 44 bp, Artificial Sequence
  Synthetic Construct
accaaggagagctgccaggccagaaaggagtacatggacacaac

SEQ ID NO: 56 - DNA, 51 bp, Artificial Sequence
  Synthetic Construct
agctgccaggccatcaaggagtaccgggacacaaccctgaacccttatatc

SEQ ID NO: 57 - DNA, 44 bp, Artificial Sequence
  Synthetic Construct
aggccatcaaggagtacatggtcacaaccctgaacccttatatc

SEQ ID NO: 58 - DNA, 47 bp, Artificial Sequence
  Synthetic Construct
aggccatcaaggagtacatggacagaaccctgaacccttatatcatc

SEQ ID NO: 59 - DNA, 45 bp, Artificial Sequence
  Synthetic Construct
atctggggctcctgggagaacaagaggaccaaggagagctgccag

SEQ ID NO: 60 - DNA, 47 bp, Artificial Sequence
  Synthetic Construct
atctggggctcctgggagaacaccctgaccaaggagagctgccaggc

SEQ ID NO: 61 - DNA, 51 bp, Artificial Sequence
  Synthetic Construct
atctggggctcctgggagaacaccagggtcaaggagagctgccaggccatc

SEQ ID NO: 62 - DNA, 57 bp, Artificial Sequence
  Synthetic Construct
atctggggctcctgggagaacaccaggaccaagtggagctgccaggccatcaaggag

SEQ ID NO: 63 - DNA, 44 bp, Artificial Sequence
  Synthetic Construct
accaaggagagctgccaggcctggaaggagtacatggacacaac

SEQ ID NO: 64 - DNA, 44 bp, Artificial Sequence
  Synthetic Construct
aggccatcaaggagtacatgtacacaaccctgaacccttatatc

SEQ ID NO: 65 - DNA, 51 bp, Artificial Sequence
  Synthetic Construct
atctggggctcctgggagaacaccaggtggaaggagagctgccaggccatc

SEQ ID NO: 66 - DNA, 44 bp, Artificial Sequence
  Synthetic Construct
agctgccaggccatcaaggagtggatggacacaaccctgaaccc

SEQ ID NO: 67 - DNA, 48 bp, Artificial Sequence
  Synthetic Construct
agcggcatcgtgatctggggctccgacgagaacaccaggaccaaggag

SEQ ID NO: 68 - DNA, 45 bp, Artificial Sequence
  Synthetic Construct
atcgtgatctggggctcctggcagaacaccaggaccaaggagagc

SEQ ID NO: 69 - DNA, 51 bp, Artificial Sequence
  Synthetic Construct
atctggggctcctgggagaacaccaggcacaaggagagctgccaggccatc

SEQ ID NO: 70 - DNA, 54 bp, Artificial Sequence
  Synthetic Construct
atctggggctcctgggagaacaccaggaccttcgagagctgccaggccatcaag

SEQ ID NO: 71 - DNA, 44 bp, Artificial Sequence
  Synthetic Construct
agaacaccaggaccaaggaggactgccaggccatcaaggagtac

SEQ ID NO: 72 - DNA, 47 bp, Artificial Sequence
  Synthetic Construct
accaggaccaaggagagctgctacgccatcaaggagtacatggacac

SEQ ID NO: 73 - DNA, 44 bp, Artificial Sequence
  Synthetic Construct
aggaccaaggagagctgccaggaaatcaaggagtacatggacac

SEQ ID NO: 74 - DNA, 51 bp, Artificial Sequence
  Synthetic Construct
agctgccaggccatcaaggagtactacgacacaaccctgaacccttatatc

SEQ ID NO: 75 - DNA, 44 bp, Artificial Sequence
  Synthetic Construct
aggccatcaaggagtacatgcagacaaccctgaacccttatatc

SEQ ID NO: 76 - DNA, 47 bp, Artificial Sequence
  Synthetic Construct
aggccatcaaggagtacatggacctaaccctgaacccttatatcatc

SEQ ID NO: 77 - DNA, 46 bp, Artificial Sequence
  Synthetic Construct
atcaaggagtacatggacacagagctgaacccttatatcatcaatg

SEQ ID NO: 78 - DNA, 43 bp, Artificial Sequence
  Synthetic Construct
agtacatggacacaaccctggagccttatatcatcaatgtgac

SEQ ID NO: 79 - DNA, 48 bp, Artificial Sequence
  Synthetic Construct
agcggcatcgtgatctggggctcccatgagaacaccaggaccaaggag

SEQ ID NO: 80 - DNA, 54 bp, Artificial Sequence
  Synthetic Construct
atctggggctcctgggagaacaccaggaccgacgagagctgccaggccatcaag

SEQ ID NO: 81 - DNA, 46 bp, Artificial Sequence
  Synthetic Construct
atcaaggagtacatggacacacacctgaacccttatatcatcaatg

SEQ ID NO: 82 - DNA, 44 bp, Artificial Sequence
  Synthetic Construct
tttggaatcacaggaggagcccgagagtatgcggagctaaacag

SEQ ID NO: 83 - DNA, 41 bp, Artificial Sequence
  Synthetic Construct
tttggaatcacaggaggagcagagtatgcggagctaaacag

SEQ ID NO: 84 - DNA, 62 bp, Artificial Sequence
  Synthetic Construct
ctctaattgcggccgcctattagtggtgatggtgatgatggtccacggcatctgtgtccttc

SEQ ID NO: 85 - DNA, 74 bp, Artificial Sequence
  Synthetic Construct
agaacaccaggaccaaggagcagtgccaggccatcaaggagtacatggaccgaaccctgaacccttatatcatc

SEQ ID NO: 86 - DNA, 55 bp, Artificial Sequence
  Synthetic Construct
taaaagagaacaggctcatatccaggggctcggcaaacttgcccaggcagaactc

SEQ ID NO: 87 - DNA, 53 bp, Artificial Sequence
  Synthetic Construct
taaaagagaacaggctcatatccaggggcgcgtcaaacttgcccaggcagaac

SEQ ID NO: 88 - DNA, 48 bp, Artificial Sequence
  Synthetic Construct
taaaagagaacaggctcatatccagggcctcgtcaaacttgcccaggc

SEQ ID NO: 89 - DNA, 46 bp, Artificial Sequence
  Synthetic Construct
taaaagagaacaggctcatatccgcgggctcgtcaaacttgcccag

SEQ ID NO: 90 - DNA, 42 bp, Artificial Sequence
  Synthetic Construct
accaggatcgtgtttacagacgcggtgctgaagttcctgtcc

SEQ ID NO: 91 - DNA, 42 bp, Artificial Sequence
  Synthetic Construct
aggatcgtgtttacagaccaggcgctgaagttcctgtcccag

SEQ ID NO: 92 - DNA, 42 bp, Artificial Sequence
  Synthetic Construct
atcgtgtttacagaccaggtggcgaagttcctgtcccaggat

SEQ ID NO: 93 - DNA, 45 bp, Artificial Sequence
  Synthetic Construct
atcgtgtttacagaccaggtgctggcgttcctgtcccaggatgag

SEQ ID NO: 94 - DNA, 47 bp, Artificial Sequence
  Synthetic Construct
gccctgtaccctagcatctatctggccacccagcagagcccagtggc

SEQ ID NO: 95 - DNA, 50 bp, Artificial Sequence
  Synthetic Construct
ctgtaccctagcatctatctgaacgcccagcagagcccagtggccgctac

SEQ ID NO: 96 - DNA, 51 bp, Artificial Sequence
  Synthetic Construct
taccctagcatctatctgaacaccgcgcagagcccagtggccgctacactg

SEQ ID NO: 97 - DNA, 55 bp, Artificial Sequence
  Synthetic Construct
taccctagcatctatctgaacacccaggcgagcccagtggccgctacactgtatg

SEQ ID NO: 98 - DNA, 54 bp, Artificial Sequence
  Synthetic Construct
agcatctatctgaacacccagcagagcgcagtggccgctacactgtatgtgagg

SEQ ID NO: 99 - DNA, 48 bp, Artificial Sequence
  Synthetic Construct
tatctgaacacccagcagagcccagcggccgctacactgtatgtgagg

SEQ ID NO: 100 - DNA, 46 bp, Artificial Sequence
  Synthetic Construct
tgtcactccggtgatagaatcggcatatggatagtagcccagtctg

SEQ ID NO: 101 - DNA, 46 bp, Artificial Sequence
  Synthetic Construct
tcactgtcactccggtgatagaagcgatatatggatagtagcccag

SEQ ID NO: 102 - DNA, 51 bp, Artificial Sequence
  Synthetic Construct
tccgttcactgtcactccggtgatagcatcgatatatggatagtagcccag

SEQ ID NO: 103 - DNA, 47 bp, Artificial Sequence
  Synthetic Construct
tccgttcactgtcactccggtggcagaatcgatatatggatagtagc

SEQ ID NO: 104 - DNA, 44 bp, Artificial Sequence
  Synthetic Construct
ttgtccactggcatgtagaaggcgatgtccttcttagccttatc

SEQ ID NO: 105 - DNA, 52 bp, Artificial Sequence
  Synthetic Construct
tgcccagattgtccactggcatgtaggcggtgatgtccttcttagccttatc

SEQ ID NO: 106 - DNA, 45 bp, Artificial Sequence
  Synthetic Construct
tgcccagattgtccactggcatggcgaaggtgatgtccttcttag

SEQ ID NO: 107 - DNA, 50 bp, Artificial Sequence
  Synthetic Construct
agatcgtcgttcctcttgatctccgcattgaaacaggagccgttgtagcc

SEQ ID NO: 108 - DNA, 53 bp, Artificial Sequence
  Synthetic Construct
gacagatcgtcgttcctcttgatcgccacattgaaacaggagccgttgtagcc

SEQ ID NO: 109 - DNA, 54 bp, Artificial Sequence
  Synthetic Construct
agccaagacagatcgtcgttcctcttggcctccacattgaaacaggagccgttg

SEQ ID NO: 110 - DNA, 51 bp, Artificial Sequence
  Synthetic Construct
agccaagacagatcgtcgttcctcgcgatctccacattgaaacaggagccg

SEQ ID NO: 111 - DNA, 44 bp, Artificial Sequence
  Synthetic Construct
tctgtggcctcggtcaggctcgcctgcacgttctgctgctgcac

SEQ ID NO: 112 - DNA, 44 bp, Artificial Sequence
  Synthetic Construct
ttctctgtggcctcggtcagggccagctgcacgttctgctgctg

SEQ ID NO: 113 - DNA, 46 bp, Artificial Sequence
  Synthetic Construct
tagccttctctgtggcctcggtcgcgctcagctgcacgttctgctg

SEQ ID NO: 114 - DNA, 44 bp, Artificial Sequence
  Synthetic Construct
ttagccttctctgtggcctcggccaggctcagctgcacgttctg

SEQ ID NO: 115 - DNA, 47 bp, Artificial Sequence
  Synthetic Construct
tcgaactcctgcttagccttctctgcggcctcggtcaggctcagctg

SEQ ID NO: 116 - DNA, 44 bp, Artificial Sequence
  Synthetic Construct
tcgaactcctgcttagccttcgctgtggcctcggtcaggctcag

SEQ ID NO: 117 - DNA, 43 bp, Artificial Sequence
  Synthetic Construct
ttctcgaactcctgcttagccgcctctgtggcctcggtcaggc

SEQ ID NO: 118 - DNA, 46 bp, Artificial Sequence
  Synthetic Construct
agagaggctatccgcgtgtctgcgatccccgacgccaagtccccac

SEQ ID NO: 119 - DNA, 44 bp, Artificial Sequence
  Synthetic Construct
aggctatccgcgtgtctaaggcccccgacgccaagtccccactg

SEQ ID NO: 120 - DNA, 47 bp, Artificial Sequence
  Synthetic Construct
aggctatccgcgtgtctaagatcgccgacgccaagtccccactgccc

SEQ ID NO: 121 - DNA, 51 bp, Artificial Sequence
  Synthetic Construct
agttttactgctcttgttattccaccgcgagctgtaaggagaaggctgatg

SEQ ID NO: 122 - DNA, 47 bp, Artificial Sequence
  Synthetic Construct
actgctcttgttattccaccctggcctgtaaggagaaggctgatgtg

SEQ ID NO: 123 - DNA, 45 bp, Artificial Sequence
  Synthetic Construct
aaggagaaggctgatgtgaaggccacagatgccgtggacgtgtgc

SEQ ID NO: 124 - DNA, 48 bp, Artificial Sequence
  Synthetic Construct
aaggagaaggctgatgtgaaggacgcagatgccgtggacgtgtgcatc

SEQ ID NO: 125 - DNA, 43 bp, Artificial Sequence
  Synthetic Construct
aaggctgatgtgaaggacacagctgccgtggacgtgtgcatcg

SEQ ID NO: 126 - DNA, 81 bp, Artificial Sequence
  Synthetic Construct
atattcgcggccgcctattagtggtgatggtgatgatgaaaggcgtcgatgcacacgccagcagcgatgcacacgtccacg

SEQ ID NO: 127 - DNA, 80 bp, Artificial Sequence
  Synthetic Construct
atattcgcggccgcctattagtggtgatggtgatgatgaaaggcgtcgatgcacacggcatcagcgatgcacacgtccac

SEQ ID NO: 128 - DNA, 75 bp, Artificial Sequence
  Synthetic Construct
atattcgcggccgcctattagtggtgatggtgatgatgaaaggcgtcgatgcacgcgccatcagcgatgcacacg

SEQ ID NO: 129 - DNA, 47 bp, Artificial Sequence
  Synthetic Construct
tgtcacgccctggccggtggcagcgatccgaggagagccgataaaag

SEQ ID NO: 130 - DNA, 45 bp, Artificial Sequence
  Synthetic Construct
tgcaccagctcgatggaccgagccttatacacgtccttaggcttc

SEQ ID NO: 131 - DNA, 44 bp, Artificial Sequence
  Synthetic Construct
ttcactgtcactccggtgatattatcgatatatggatagtagcc

SEQ ID NO: 132 - DNA, 47 bp, Artificial Sequence
  Synthetic Construct
tccgttcactgtcactccggtctgagaatcgatatatggatagtagc

SEQ ID NO: 133 - DNA, 46 bp, Artificial Sequence
  Synthetic Construct
accctagcatctatctgaacaccgatcagagcccagtggccgctac

SEQ ID NO: 134 - DNA, 46 bp, Artificial Sequence
  Synthetic Construct
accctagcatctatctgaacaccatccagagcccagtggccgctac

SEQ ID NO: 135 - DNA, 42 bp, Artificial Sequence
  Synthetic Construct
aggctatccgcgtgtctaagggccccgacgccaagtccccac

SEQ ID NO: 136 - DNA, 40 bp, Artificial Sequence
  Synthetic Construct
atccgcgtgtctaagatcgacgacgccaagtccccactgc

SEQ ID NO: 137 - DNA, 40 bp, Artificial Sequence
  Synthetic Construct
agaaggctgatgtgaaggacgacgatgccgtggacgtgtg

SEQ ID NO: 138 - DNA, 40 bp, Artificial Sequence
  Synthetic Construct
agaaggctgatgtgaaggaccacgatgccgtggacgtgtg

SEQ ID NO: 139 - DNA, 40 bp, Artificial Sequence
  Synthetic Construct
agaaggctgatgtgaaggacaaagatgccgtggacgtgtg

SEQ ID NO: 140 - DNA, 40 bp, Artificial Sequence
  Synthetic Construct
agaaggctgatgtgaaggacggagatgccgtggacgtgtg

SEQ ID NO: 141 - DNA, 40 bp, Artificial Sequence
  Synthetic Construct
agaaggctgatgtgaaggacccagatgccgtggacgtgtg

SEQ ID NO: 142 - DNA, 40 bp, Artificial Sequence
  Synthetic Construct
agaaggctgatgtgaaggacatggatgccgtggacgtgtg

SEQ ID NO: 143 - DNA, 40 bp, Artificial Sequence
  Synthetic Construct
agaaggctgatgtgaaggacttcgatgccgtggacgtgtg

SEQ ID NO: 144 - DNA, 82 bp, Artificial Sequence
  Synthetic Construct
ctctaattgcggccgcctattagtggtgatggtgatgatgaaaggcgtcgatgcacacgcccctagcgatgcacacgtccac

SEQ ID NO: 145 - DNA, 76 bp, Artificial Sequence
  Synthetic Construct
ctctaattgcggccgctcattagtggtgatggtgatgatgaaaggcgtcgatgcagtagccatcagcgatgcacac

SEQ ID NO: 146 - DNA, 44 bp, Artificial Sequence
  Synthetic Construct
ttctctgtggcctcggtcagggtcagctgcacgttctgctgctg

SEQ ID NO: 147 - DNA, 41 bp, Artificial Sequence
  Synthetic Construct
aggagaaggctgatgtgaagagcacagatgccgtggacgtg

SEQ ID NO: 148 - DNA, 45 bp, Artificial Sequence
  Synthetic Construct
atcgtgtttacagaccaggtgccgaagttcctgtcccaggatgag

SEQ ID NO: 149 - DNA, 45 bp, Artificial Sequence
  Synthetic Construct
atcgtgtttacagaccaggtgatgaagttcctgtcccaggatgag

SEQ ID NO: 150 - DNA, 44 bp, Artificial Sequence
  Synthetic Construct
tctgtggcctcggtcaggctcgactgcacgttctgctgctgcac

SEQ ID NO: 151 - DNA, 44 bp, Artificial Sequence
  Synthetic Construct
tctgtggcctcggtcaggctaatctgcacgttctgctgctgcac

SEQ ID NO: 152 - DNA, 44 bp, Artificial Sequence
  Synthetic Construct
tctgtggcctcggtcaggctaaactgcacgttctgctgctgcac

SEQ ID NO: 153 - DNA, 84 bp, Artificial Sequence
  Synthetic Construct
atcgtgatctggggctcctgggagttcaccaggacccaggagagctgccaggccatccaggagtacatggacacaaccctgaac

SEQ ID NO: 154 - DNA, 46 bp, Artificial Sequence
  Synthetic Construct
accctagcatctatctgaacaccaaccagagcccagtggccgctac

SEQ ID NO: 155 - DNA, 17 bp, Artificial Sequence
  Synthetic Construct
gcccaggcagaactcgc

SEQ ID NO: 156 - DNA, 62 bp, Artificial Sequence
  Synthetic Construct
tctcgaactcctgcttagccttatctgtggcctcggtcatgctcagctgcacgttctgctgc

SEQ ID NO: 157 - DNA, 46 bp, Artificial Sequence
  Synthetic Construct
accctagcatctatctgaacaccgcgcagagcccagtggccgctac

SEQ ID NO: 158 - DNA, 60 bp, Artificial Sequence
  Synthetic Construct
atcgtgatctggggctcctgggagatcaccaggaccatggagagctgccaggccatcaag

SEQ ID NO: 159 - DNA, 60 bp, Artificial Sequence
  Synthetic Construct
agcggcatcgtgatctggggcgacctgtcgatctcctcgaccatggagagctgccaggcc

SEQ ID NO: 160 - DNA, 57 bp, Artificial Sequence
  Synthetic Construct
agcggcatcgtgatctggggcgacctgtcgatctccaggaccatggagagctgccag

SEQ ID NO: 161 - DNA, 54 bp, Artificial Sequence
  Synthetic Construct
atctggggctcctgggagaacaccaggaccatggagagctgccaggccatcaag

SEQ ID NO: 162 - DNA, 60 bp, Artificial Sequence; identical to SEQ ID NO: 158
  Synthetic Construct

SEQ ID NO: 163 - protein, 455 aa, Artificial Sequence
  Synthetic Construct
LNFRAPPVIPNVPFLWAWNAPSEFCLGKFDEPLDMSLFSFIGSPRINATGQGVTIFYVDRLGYYPYIDSITGVTVNGGIPQKISLQDHLDKAKKDITFYMPVDNLGMAVIDWEEWRPTWARNWKPKDVYKNRSIELVQQQNVQLSLTEATEKAKQEFEKAGKDFLVETIKLGKLLRPNHLWGYYLFPDCYNHHYKKPGYNGSCFNVEIKRNDDLSWLWNESTALYPSIYLNTQQSPVAATLYVRNRVREAIRVSKIPDAKSPLPVFAYTRIVFTDQVLKFLSQDELVYTFGETVALGASGIVIWGTLSITTSTETCQYLKDYLTRLLNPYIINVTLAAKMCSQVLCQEQGVCIRKNWNSSDYLHLNPDNFAIQLEKGGKFTVRGKPTLEDLEQFSEKFYCSCYSTLSCKEKADVKDTDAVDVCIADGVCIDAFLKPPMETEEPQIFYNASPSTLS

SEQ ID NO: 164 - protein, 455 aa, Artificial Sequence
  Synthetic Construct
LNFRAPPVIPNVPFLWAWNAPSEFCLGKFDEPLDMSLFSFIGSPRINATGQGVTIFYVDRLGYYPYIDSITGVTVNGGIPQKISLQDHLDKAKKDITFYMPVDNLGMAVIDWEEWRPTWARNWKPKDVYKNRSIELVQQQNVQLSLTEATEKAKQEFEKAGKDFLVETIKLGKLLRPNHLWGYYLFPDCYNHHYKKPGYNGSCFNVEIKRNDDLSWLWNESTALYPSIYLNTQQSPVAATLYVRNRVREAIRVSKIPDAKSPLPVFAYTRIVFTDQVLKFLSQDELVYTFGETVALGASGIVIWGTLSISSSEEECWHLHDYLVDTLNPYIINVTLAAKMCSQVLCQEQGVCIRKNWNSSDYLHLNPDNFAIQLEKGGKFTVRGKPTLEDLEQFSEKFYCSCYSTLSCKEKADVKDTDAVDVCIADGVCIDAFLKPPMETEEPQIFYNASPSTLS

SEQ ID NO: 165 - protein, 455 aa, Artificial Sequence
  Synthetic Construct
LNFRAPPVIPNVPFLWAWNAPSEFCLGKFDEPLDMSLFSFIGSPRINATGQGVTIFYVDRLGYYPYIDSITGVTVNGGIPQKISLQDHLDKAKKDITFYMPVDNLGMAVIDWEEWRPTWARNWKPKDVYKNRSIELVQQQNVQLSLTEATEKAKQEFEKAGKDFLVETIKLGKLLRPNHLWGYYLFPDCYNHHYKKPGYNGSCFNVEIKRNDDLSWLWNESTALYPSIYLNTQQSPVAATLYVRNRVREAIRVSKIPDAKSPLPVFAYTRIVFTDQVLKFLSQDELVYTFGETVALGASGIVIWGTLSITASKANCTKVKQFVSSDLNPYIINVTLAAKMCSQVLCQEQGVCIRKNWNSSDYLHLNPDNFAIQLEKGGKFTVRGKPTLEDLEQFSEKFYCSCYSTLSCKEKADVKDTDAVDVCIADGVCIDAFLKPPMETEEPQIFYNASPSTLS

SEQ ID NO: 166 - protein, 431 aa, Artificial Sequence
  Synthetic Construct
FRAPPVIPNVPFLWAWNAPSEFCLGKFDEPLDMSLFSFIGSPRINATGQGVTIFYVDRLGYYPYIDSITGVTVNGGIPQKISLQDHLDKAKKDITFYMPVDNLGMAVIDWEEWRPTWARNWKPKDVYKNRSIELVQQQNVQLSLTEATEKAKQEFEKAGKDFLVETIKLGKLLRPNHLWGYYLFPDCYNHHYKKPGYNGSCFNVEIKRNDDLSWLWNESTALYPSIYLNTQQSPVAATLYVRNRVREAIRVSKIPDAKSPLPVFAYTRIVFTDQVLKFLSQDELVYTFGETVALGASGIVIWGSWENTMTKESCQAIKEYMDTTLNPYIINVTLAAKMCSQVLCQEQGVCIRKNWNSSDYLHLNPDNFAIQLEKGGKFTVRGKPTLEDLEQFSEKFYCSCYSTLSCKEKADVKDTDAVDVCIADGVCIDAF

SEQ ID NO: 167 - protein, 431 aa, Artificial Sequence
  Synthetic Construct
FRAPPVIPNVPFLWAWNAPSEFCLGKFDEPLDMSLFSFIGSPRINATGQGVTIFYVDRLGYYPYIDSITGVTVNGGIPQKISLQDHLDKAKKDITFYMPVDNLGMAVIDWEEWRPTWARNWKPKDVYKNRSIELVQQQNVQLSLTEATEKAKQEFEKAGKDFLVETIKLGKLLRPNHLWGYYLFPDCYNHHYKKPGYNGSCFNVEIKRNDDLSWLWNESTALYPSIYLNTQQSPVAATLYVRNRVREAIRVSKIPDAKSPLPVFAYTRIVFTDQVLKFLSQDELVYTFGETVALGASGIVIWGSWENTRQKESCQAIKEYMDTTLNPYIINVTLAAKMCSQVLCQEQGVCIRKNWNSSDYLHLNPDNFAIQLEKGGKFTVRGKPTLEDLEQFSEKFYCSCYSTLSCKEKADVKDTDAVDVCIADGVCIDAF

SEQ ID NO: 168 - protein, 431 aa, Artificial Sequence
  Synthetic Construct
FRAPPVIPNVPFLWAWNAPSEFCLGKFDEPLDMSLFSFIGSPRINATGQGVTIFYVDRLGYYPYIDSITGVTVNGGIPQKISLQDHLDKAKKDITFYMPVDNLGMAVIDWEEWRPTWARNWKPKDVYKNRSIELVQQQNVQLSLTEATEKAKQEFEKAGKDFLVETIKLGKLLRPNHLWGYYLFPDCYNHHYKKPGYNGSCFNVEIKRNDDLSWLWNESTALYPSIYLNTQQSPVAATLYVRNRVREAIRVSKIPDAKSPLPVFAYTRIVFTDQVLKFLSQDELVYTFGETVALGASGIVIWGSWENTRTQESCQAIKEYMDTTLNPYIINVTLAAKMCSQVLCQEQGVCIRKNWNSSDYLHLNPDNFAIQLEKGGKFTVRGKPTLEDLEQFSEKFYCSCYSTLSCKEKADVKDTDAVDVCIADGVCIDAF

SEQ ID NO: 169 - protein, 431 aa, Artificial Sequence
  Synthetic Construct
FRAPPVIPNVPFLWAWNAPSEFCLGKFDEPLDMSLFSFIGSPRINATGQGVTIFYVDRLGYYPYIDSITGVTVNGGIPQKISLQDHLDKAKKDITFYMPVDNLGMAVIDWEEWRPTWARNWKPKDVYKNRSIELVQQQNVQLSLTEATEKAKQEFEKAGKDFLVETIKLGKLLRPNHLWGYYLFPDCYNHHYKKPGYNGSCFNVEIKRNDDLSWLWNESTALYPSIYLNTQQSPVAATLYVRNRVREAIRVSKIPDAKSPLPVFAYTRIVFTDQVLKFLSQDELVYTFGETVALGASGIVIWGSWENTRTKEQCQAIKEYMDTTLNPYIINVTLAAKMCSQVLCQEQGVCIRKNWNSSDYLHLNPDNFAIQLEKGGKFTVRGKPTLEDLEQFSEKFYCSCYSTLSCKEKADVKDTDAVDVCIADGVCIDAF

SEQ ID NO: 170 - protein, 431 aa, Artificial Sequence
  Synthetic Construct
FRAPPVIPNVPFLWAWNAPSEFCLGKFDEPLDMSLFSFIGSPRINATGQGVTIFYVDRLGYYPYIDSITGVTVNGGIPQKISLQDHLDKAKKDITFYMPVDNLGMAVIDWEEWRPTWARNWKPKDVYKNRSIELVQQQNVQLSLTEATEKAKQEFEKAGKDFLVETIKLGKLLRPNHLWGYYLFPDCYNHHYKKPGYNGSCFNVEIKRNDDLSWLWNESTALYPSIYLNTQQSPVAATLYVRNRVREAIRVSKIPDAKSPLPVFAYTRIVFTDQVLKFLSQDELVYTFGETVALGASGIVIWGSWENTRTKESCQAIQEYMDTTLNPYIINVTLAAKMCSQVLCQEQGVCIRKNWNSSDYLHLNPDNFAIQLEKGGKFTVRGKPTLEDLEQFSEKFYCSCYSTLSCKEKADVKDTDAVDVCIADGVCIDAF

SEQ ID NO: 171 - protein, 431 aa, Artificial Sequence
  Synthetic Construct
FRAPPVIPNVPFLWAWNAPSEFCLGKFDEPLDMSLFSFIGSPRINATGQGVTIFYVDRLGYYPYIDSITGVTVNGGIPQKISLQDHLDKAKKDITFYMPVDNLGMAVIDWEEWRPTWARNWKPKDVYKNRSIELVQQQNVQLSLTEATEKAKQEFEKAGKDFLVETIKLGKLLRPNHLWGYYLFPDCYNHHYKKPGYNGSCFNVEIKRNDDLSWLWNESTALYPSIYLNTQQSPVAATLYVRNRVREAIRVSKIPDAKSPLPVFAYTRIVFTDQVLKFLSQDELVYTFGETVALGASGIVIWGSWENTRTKESCQAIKEYVDTTLNPYIINVTLAAKMCSQVLCQEQGVCIRKNWNSSDYLHLNPDNFAIQLEKGGKFTVRGKPTLEDLEQFSEKFYCSCYSTLSCKEKADVKDTDAVDVCIADGVCIDAF

SEQ ID NO: 172 - protein, 431 aa, Artificial Sequence
  Synthetic Construct
FRAPPVIPNVPFLWAWNAPSEFCLGKFDEPLDMSLFSFIGSPRINATGQGVTIFYVDRLGYYPYIDSITGVTVNGGIPQKISLQDHLDKAKKDITFYMPVDNLGMAVIDWEEWRPTWARNWKPKDVYKNRSIELVQQQNVQLSLTEATEKAKQEFEKAGKDFLVETIKLGKLLRPNHLWGYYLFPDCYNHHYKKPGYNGSCFNVEIKRNDDLSWLWNESTALYPSIYLNTQQSPVAATLYVRNRVREAIRVSKIPDAKSPLPVFAYTRIVFTDQVLKFLSQDELVYTFGETVALGASGIVIWGSWENTRTKESCQAIKEYMDTTANPYIINVTLAAKMCSQVLCQEQGVCIRKNWNSSDYLHLNPDNFAIQLEKGGKFTVRGKPTLEDLEQFSEKFYCSCYSTLSCKEKADVKDTDAVDVCIADGVCIDAF

SEQ ID NO: 173 - protein, 431 aa, Artificial Sequence
  Synthetic Construct
FRAPPVIPNVPFLWAWNAPSEFCLGKFDEPLDMSLFSFIGSPRINATGQGVTIFYVDRLGYYPYIDSITGVTVNGGIPQKISLQDHLDKAKKDITFYMPVDNLGMAVIDWEEWRPTWARNWKPKDVYKNRSIELVQQQNVQLSLTEATEKAKQEFEKAGKDFLVETIKLGKLLRPNHLWGYYLFPDCYNHHYKKPGYNGSCFNVEIKRNDDLSWLWNESTALYPSIYLNTQQSPVAATLYVRNRVREAIRVSKIPDAKSPLPVFAYTRIVFTDQVLKFLSQDELVYTFGETVALGASGIVIWGSWVNTRTKESCQAIKEYMDTTLNPYIINVTLAAKMCSQVLCQEQGVCIRKNWNSSDYLHLNPDNFAIQLEKGGKFTVRGKPTLEDLEQFSEKFYCSCYSTLSCKEKADVKDTDAVDVCIADGVCIDAF

SEQ ID NO: 174 - protein, 431 aa, Artificial Sequence
  Synthetic Construct
FRAPPVIPNVPFLWAWNAPSEFCLGKFDEPLDMSLFSFIGSPRINATGQGVTIFYVDRLGYYPYIDSITGVTVNGGIPQKISLQDHLDKAKKDITFYMPVDNLGMAVIDWEEWRPTWARNWKPKDVYKNRSIELVQQQNVQLSLTEATEKAKQEFEKAGKDFLVETIKLGKLLRPNHLWGYYLFPDCYNHHYKKPGYNGSCFNVEIKRNDDLSWLWNESTALYPSIYLNTQQSPVAATLYVRNRVREAIRVSKIPDAKSPLPVFAYTRIVFTDQVLKFLSQDELVYTFGETVALGASGIVIWGSWEFTRTKESCQAIKEYMDTTLNPYIINVTLAAKMCSQVLCQEQGVCIRKNWNSSDYLHLNPDNFAIQLEKGGKFTVRGKPTLEDLEQFSEKFYCSCYSTLSCKEKADVKDTDAVDVCIADGVCIDAF

SEQ ID NO: 175 - protein, 431 aa, Artificial Sequence
  Synthetic Construct
FRAPPVIPNVPFLWAWNAPSEFCLGKFDEPLDMSLFSFIGSPRINATGQGVTIFYVDRLGYYPYIDSITGVTVNGGIPQKISLQDHLDKAKKDITFYMPVDNLGMAVIDWEEWRPTWARNWKPKDVYKNRSIELVQQQNVQLSLTEATEKAKQEFEKAGKDFLVETIKLGKLLRPNHLWGYYLFPDCYNHHYKKPGYNGSCFNVEIKRNDDLSWLWNESTALYPSIYLNTQQSPVAATLYVRNRVREAIRVSKIPDAKSPLPVFAYTRIVFTDQVLKFLSQDELVYTFGETVALGASGIVIWGSWENTRTKESCQAIKEYMKTTLNPYIINVTLAAKMCSQVLCQEQGVCIRKNWNSSDYLHLNPDNFAIQLEKGGKFTVRGKPTLEDLEQFSEKFYCSCYSTLSCKEKADVKDTDAVDVCIADGVCIDAF

SEQ ID NO: 176 - protein, 431 aa, Artificial Sequence
  Synthetic Construct
FRAPPVIPNVPFLWAWNAPSEFCLGKFDEPLDMSLFSFIGSPRINATGQGVTIFYVDRLGYYPYIDSITGVTVNGGIPQKISLQDHLDKAKKDITFYMPVDNLGMAVIDWEEWRPTWARNWKPKDVYKNRSIELVQQQNVQLSLTEATEKAKQEFEKAGKDFLVETIKLGKLLRPNHLWGYYLFPDCYNHHYKKPGYNGSCFNVEIKRNDDLSWLWNESTALYPSIYLNTQQSPVAATLYVRNRVREAIRVSKIPDAKSPLPVFAYTRIVFTDQVLKFLSQDELVYTFGETVALGASGIVIWGSWENTRTKESCQAIKEYMDYTLNPYIINVTLAAKMCSQVLCQEQGVCIRKNWNSSDYLHLNPDNFAIQLEKGGKFTVRGKPTLEDLEQFSEKFYCSCYSTLSCKEKADVKDTDAVDVCIADGVCIDAF

SEQ ID NO: 177 - protein, 431 aa, Artificial Sequence
  Synthetic Construct
FRAPPVIPNVPFLWAWNAPSEFCLGKFDEPLDMSLFSFIGSPRINATGQGVTIFYVDRLGYYPYIDSITGVTVNGGIPQKISLQDHLDKAKKDITFYMPVDNLGMAVIDWEEWRPTWARNWKPKDVYKNRSIELVQQQNVQLSLTEATEKAKQEFEKAGKDFLVETIKLGKLLRPNHLWGYYLFPDCYNHHYKKPGYNGSCFNVEIKRNDDLSWLWNESTALYPSIYLNTQQSPVAATLYVRNRVREAIRVSKIPDAKSPLPVFAYTRIVFTDQVLKFLSQDELVYTFGETVALGASGIVIWGSWENTRTKESCQAIKEYMDTMLNPYIINVTLAAKMCSQVLCQEQGVCIRKNWNSSDYLHLNPDNFAIQLEKGGKFTVRGKPTLEDLEQFSEKFYCSCYSTLSCKEKADVKDTDAVDVCIADGVCIDAF

SEQ ID NO: 178 - protein, 431 aa, Artificial Sequence
  Synthetic Construct
FRAPPVIPNVPFLWAWNAPSEFCLGKFDEPLDMSLFSFIGSPRINATGQGVTIFYVDRLGYYPYIDSITGVTVNGGIPQKISLQDHLDKAKKDITFYMPVDNLGMAVIDWEEWRPTWARNWKPKDVYKNRSIELVQQQNVQLSLTEATEKAKQEFEKAGKDFLVETIKLGKLLRPNHLWGYYLFPDCYNHHYKKPGYNGSCFNVEIKRNDDLSWLWNESTALYPSIYLNTQQSPVAATLYVRNRVREAIRVSKIPDAKSPLPVFAYTRIVFTDQVLKFLSQDELVYTFGETVALGASGIVIWGSWENTRTKESCEAIKEYMDTTLNPYIINVTLAAKMCSQVLCQEQGVCIRKNWNSSDYLHLNPDNFAIQLEKGGKFTVRGKPTLEDLEQFSEKFYCSCYSTLSCKEKADVKDTDAVDVCIADGVCIDAF

SEQ ID NO: 179 - protein, 431 aa, Artificial Sequence
  Synthetic Construct
FRAPPVIPNVPFLWAWNAPSEFCLGKFDEPLDMSLFSFIGSPRINATGQGVTIFYVDRLGYYPYIDSITGVTVNGGIPQKISLQDHLDKAKKDITFYMPVDNLGMAVIDWEEWRPTWARNWKPKDVYKNRSIELVQQQNVQLSLTEATEKAKQEFEKAGKDFLVETIKLGKLLRPNHLWGYYLFPDCYNHHYKKPGYNGSCFNVEIKRNDDLSWLWNESTALYPSIYLNTQQSPVAATLYVRNRVREAIRVSKIPDAKSPLPVFAYTRIVFTDQVLKFLSQDELVYTFGETVALGASGIVIWGSWENTRTKESCQAIKEYMDTTLMPYIINVTLAAKMCSQVLCQEQGVCIRKNWNSSDYLHLNPDNFAIQLEKGGKFTVRGKPTLEDLEQFSEKFYCSCYSTLSCKEKADVKDTDAVDVCIADGVCIDAF

SEQ ID NO: 180 - protein, 431 aa, Artificial Sequence
  Synthetic Construct
FRAPPVIPNVPFLWAWNAPSEFCLGKFDEPLDMSLFSFIGSPRINANGQGVTIFYVDRLGYYPYIDSITGVTVNGGIPQKISLQDHLDKAKKDITFYMPVDNLGMAVIDWEEWRPTWARNWKPKDVYKNRSIELVQQQNVQLSLTEATEKAKQEFEKAGKDFLVETIKLGKLLRPNHLWGYYLFPDCYNHHYKKPGYNGSCFNVEIKRNDDLSWLWNESTALYPSIYLNTQQSPVAATLYVRNRVREAIRVSKIPDAKSPLPVFAYTRIVFTDQVLKFLSQDELVYTFGETVALGASGIVIWGSWENTRTKESCQAIKEYMDTTLNPYIINVTLAAKMCSQVLCQEQGVCIRKNWNSSDYLHLNPDNFAIQLEKGGKFTVRGKPTLEDLEQFSEKFYCSCYSTLSCKEKADVKDTDAVDVCIADGVCIDAF

SEQ ID NO: 181 - protein, 431 aa, Artificial Sequence
  Synthetic Construct
FRAPPVIPNVPFLWAWNAPSEFCLGKFDEPLDMSLFSFIGSPRINATGQGVTIFYVDRLGYYPYIDSITGVTVNGGIPQKISLQDHLDKAKKDITFYMPVDNLGMAVIDWEEWRPTWARNWKPKDVYKKRSIELVQQQNVQLSLTEATEKAKQEFEKAGKDFLVETIKLGKLLRPNHLWGYYLFPDCYNHHYKKPGYNGSCFNVEIKRNDDLSWLWNESTALYPSIYLNTQQSPVAATLYVRNRVREAIRVSKIPDAKSPLPVFAYTRIVFTDQVLKFLSQDELVYTFGETVALGASGIVIWGSWENTRTKESCQAIKEYMDTTLNPYIINVTLAAKMCSQVLCQEQGVCIRKNWNSSDYLHLNPDNFAIQLEKGGKFTVRGKPTLEDLEQFSEKFYCSCYSTLSCKEKADVKDTDAVDVCIADGVCIDAF

SEQ ID NO: 182 - protein, 431 aa, Artificial Sequence
  Synthetic Construct
FRAPPVIPNVPFLWAWNAPSEFCLGKFDEPLDMSLFSFIGSPRINATGQGVTIFYVDRLGYYPYIDSITGVTVNGGIPQKISLQDHLDKAKKDITFYMPVDNLGMAVIDWEEWRPTWARNWKPKDVYKNRSIELVQQQNVQLSLTEATEKAKQEFEKAGKDFLVETIKLGKLLRPNHLWGYYLFPDCYNHHYKKPGYNGSCFNVEIKRNDDLSWLWNESTALYPSIYLNTQQSPVAATLYVRNRVREAIRVSKIPDAKSPLPVFAYTRIVFTDQVLKFLSQDELVYTFGETVALGASGIVIWGSWENTRTKESCQAEKEYMDTTLNPYIINVTLAAKMCSQVLCQEQGVCIRKNWNSSDYLHLNPDNFAIQLEKGGKFTVRGKPTLEDLEQFSEKFYCSCYSTLSCKEKADVKDTDAVDVCIADGVCIDAF

SEQ ID NO: 183 - protein, 431 aa, Artificial Sequence
  Synthetic Construct
FRAPPVIPNVPFLWAWNAPSEFCLGKFDEPLDMSLFSFIGSPRINATGQGVTIFYVDRLGYYPYIDSITGVTVNGGIPQKISLQDHLDKAKKDITFYMPVDNLGMAVIDWEEWRPTWARNWKPKDVYKNRSIELVQQQNVQLSLTEATEKAKQEFEKAGKDFLVETIKLGKLLRPNHLWGYYLFPDCYNHHYKKPGYNGSCFNVEIKRNDDLSWLWNESTALYPSIYLNTQQSPVAATLYVRNRVREAIRVSKIPDAKSPLPVFAYTRIVFTDQVLKFLSQDELVYTFGETVALGASGIVIWGSWENTRTKESCQAQKEYMDTTLNPYIINVTLAAKMCSQVLCQEQGVCIRKNWNSSDYLHLNPDNFAIQLEKGGKFTVRGKPTLEDLEQFSEKFYCSCYSTLSCKEKADVKDTDAVDVCIADGVCIDAF

SEQ ID NO: 184 - protein, 431 aa, Artificial Sequence
  Synthetic Construct
FRAPPVIPNVPFLWAWNAPSEFCLGKFDEPLDMSLFSFIGSPRINATGQGVTIFYVDRLGYYPYIDSITGVTVNGGIPQKISLQDHLDKAKKDITFYMPVDNLGMAVIDWEEWRPTWARNWKPKDVYKNRSIELVQQQNVQLSLTEATEKAKQEFEKAGKDFLVETIKLGKLLRPNHLWGYYLFPDCYNHHYKKPGYNGSCFNVEIKRNDDLSWLWNESTALYPSIYLNTQQSPVAATLYVRNRVREAIRVSKIPDAKSPLPVFAYTRIVFTDQVLKFLSQDELVYTFGETVALGASGIVIWGSWENTRTKESCQASKEYMDTTLNPYIINVTLAAKMCSQVLCQEQGVCIRKNWNSSDYLHLNPDNFAIQLEKGGKFTVRGKPTLEDLEQFSEKFYCSCYSTLSCKEKADVKDTDAVDVCIADGVCIDAF

SEQ ID NO: 185 - protein, 431 aa, Artificial Sequence
  Synthetic Construct
FRAPPVIPNVPFLWAWNAPSEFCLGKFDEPLDMSLFSFIGSPRINATGQGVTIFYVDRLGYYPYIDSITGVTVNGGIPQKISLQDHLDKAKKDITFYMPVDNLGMAVIDWEEWRPTWARNWKPKDVYKNRSIELVQQQNVQLSLTEATEKAKQEFEKAGKDFLVETIKLGKLLRPNHLWGYYLFPDCYNHHYKKPGYNGSCFNVEIKRNDDLSWLWNESTALYPSIYLNTQQSPVAATLYVRNRVREAIRVSKIPDAKSPLPVFAYTRIVFTDQVLKFLSQDELVYTFGETVALGASGIVIWGSWENTRTKESCQAVKEYMDTTLNPYIINVTLAAKMCSQVLCQEQGVCIRKNWNSSDYLHLNPDNFAIQLEKGGKFTVRGKPTLEDLEQFSEKFYCSCYSTLSCKEKADVKDTDAVDVCIADGVCIDAF

SEQ ID NO: 186 - protein, 431 aa, Artificial Sequence
  Synthetic Construct
FRAPPVIPNVPFLWAWNAPSEFCLGKFDEPLDMSLFSFIGSPRINATGQGVTIFYVDRLGYYPYIDSITGVTVNGGIPQKISLQDHLDKAKKDITFYMPVDNLGMAVIDWEEWRPTWARNWKPKDVYKNRSIELVQQQNVQLSLTEATEKAKQEFEKAGKDFLVETIKLGKLLRPNHLWGYYLFPDCYNHHYKKPGYNGSCFNVEIKRNDDLSWLWNESTALYPSIYLNTQQSPVAATLYVRNRVREAIRVSKIPDAKSPLPVFAYTRIVFTDQVLKFLSQDELVYTFGETVALGASGIVIWGSWENTRTKESCQAAKEYMDTTLNPYIINVTLAAKMCSQVLCQEQGVCIRKNWNSSDYLHLNPDNFAIQLEKGGKFTVRGKPTLEDLEQFSEKFYCSCYSTLSCKEKADVKDTDAVDVCIADGVCIDAF

SEQ ID NO: 187 - protein, 431 aa, Artificial Sequence
  Synthetic Construct
FRAPPVIPNVPFLWAWNAPSEFCLGKFDEPLDMSLFSFIGSPRINATGQGVTIFYVDRLGYYPYIDSITGVTVNGGIPQKISLQDHLDKAKKDITFYMPVDNLGMAVIDWEEWRPTWARNWKPKDVYKNRSIELVQQQNVQLSLTEATEKAKQEFEKAGKDFLVETIKLGKLLRPNHLWGYYLFPDCYNHHYKKPGYNGSCFNVEIKRNDDLSWLWNESTALYPSIYLNTQQSPVAATLYVRNRVREAIRVSKIPDAKSPLPVFAYTRIVFTDQVLKFLSQDELVYTFGETVALGASGIVIWGSWENTRTKESCQANKEYMDTTLNPYIINVTLAAKMCSQVLCQEQGVCIRKNWNSSDYLHLNPDNFAIQLEKGGKFTVRGKPTLEDLEQFSEKFYCSCYSTLSCKEKADVKDTDAVDVCIADGVCIDAF

SEQ ID NO: 188 - protein, 431 aa, Artificial Sequence
  Synthetic Construct
FRAPPVIPNVPFLWAWNAPSEFCLGKFDEPLDMSLFSFIGSPRINATGQGVTIFYVDRLGYYPYIDSITGVTVNGGIPQKISLQDHLDKAKKDITFYMPVDNLGMAVIDWEEWRPTWARNWKPKDVYKNRSIELVQQQNVQLSLTEATEKAKQEFEKAGKDFLVETIKLGKLLRPNHLWGYYLFPDCYNHHYKKPGYNGSCFNVEIKRNDDLSWLWNESTALYPSIYLNTQQSPVAATLYVRNRVREAIRVSKIPDAKSPLPVFAYTRIVFTDQVLKFLSQDELVYTFGETVALGASGIVIWGSWENTRTKESCQATKEYMDTTLNPYIINVTLAAKMCSQVLCQEQGVCIRKNWNSSDYLHLNPDNFAIQLEKGGKFTVRGKPTLEDLEQFSEKFYCSCYSTLSCKEKADVKDTDAVDVCIADGVCIDAF

SEQ ID NO: 189 - protein, 431 aa, Artificial Sequence
  Synthetic Construct
FRAPPVIPNVPFLWAWNAPSEFCLGKFDEPLDMSLFSFIGSPRINATGQGVTIFYVDRLGYYPYIDSITGVTVNGGIPQKISLQDHLDKAKKDITFYMPVDNLGMAVIDWEEWRPTWARNWKPKDVYKNRSIELVQQQNVQLSLTEATEKAKQEFEKAGKDFLVETIKLGKLLRPNHLWGYYLFPDCYNHHYKKPGYNGSCFNVEIKRNDDLSWLWNESTALYPSIYLNTQQSPVAATLYVRNRVREAIRVSKIPDAKSPLPVFAYTRIVFTDQVLKFLSQDELVYTFGETVALGASGIVIWGSWENTRTKESCQAIKMYMDTTLNPYIINVTLAAKMCSQVLCQEQGVCIRKNWNSSDYLHLNPDNFAIQLEKGGKFTVRGKPTLEDLEQFSEKFYCSCYSTLSCKEKADVKDTDAVDVCIADGVCIDAF

SEQ ID NO: 190 - protein, 431 aa, Artificial Sequence
  Synthetic Construct
FRAPPVIPNVPFLWAWNAPSEFCLGKFDEPLDMSLFSFIGSPRINATGQGVTIFYVDRLGYYPYIDSITGVTVNGGIPQKISLQDHLDKAKKDITFYMPVDNLGMAVIDWEEWRPTWARNWKPKDVYKNRSIELVQQQNVQLSLTEATEKAKQEFEKAGKDFLVETIKLGKLLRPNHLWGYYLFPDCYNHHYKKPGYNGSCFNVEIKRNDDLSWLWNESTALYPSIYLNTQQSPVAATLYVRNRVREAIRVSKIPDAKSPLPVFAYTRIVFTDQVLKFLSQDELVYTFGETVALGASGIVIWGSWENTRTKESCQAIKFYMDTTLNPYIINVTLAAKMCSQVLCQEQGVCIRKNWNSSDYLHLNPDNFAIQLEKGGKFTVRGKPTLEDLEQFSEKFYCSCYSTLSCKEKADVKDTDAVDVCIADGVCIDAF

SEQ ID NO: 191 - protein, 431 aa, Artificial Sequence
  Synthetic Construct
FRAPPVIPNVPFLWAWNAPSEFCLGKFDEPLDMSLFSFIGSPRINATGQGVTIFYVDRLGYYPYIDSITGVTVNGGIPQKISLQDHLDKAKKDITFYMPVDNLGMAVIDWEEWRPTWARNWKPKDVYKNRSIELVQQQNVQLSLTEATEKAKQEFEKAGKDFLVETIKLGKLLRPNHLWGYYLFPDCYNHHYKKPGYNGSCFNVEIKRNDDLSWLWNESTALYPSIYLNTQQSPVAATLYVRNRVREAIRVSKIPDAKSPLPVFAYTRIVFTDQVLKFLSQDELVYTFGETVALGASGIVIWGSWENTRTKESCQAIKIYMDTTLNPYIINVTLAAKMCSQVLCQEQGVCIRKNWNSSDYLHLNPDNFAIQLEKGGKFTVRGKPTLEDLEQFSEKFYCSCYSTLSCKEKADVKDTDAVDVCIADGVCIDAF

SEQ ID NO: 192 - protein, 431 aa, Artificial Sequence
  Synthetic Construct
FRAPPVIPNVPFLWAWNAPSEFCLGKFDEPLDMSLFSFIGSPRINATGQGVTIFYVDRLGYYPYIDSITGVTVNGGIPQKISLQDHLDKAKKDITFYMPVDNLGMAVIDWEEWRPTWARNWKPKDVYKNRSIELVQQQNVQLSLTEATEKAKQEFEKAGKDFLVETIKLGKLLRPNHLWGYYLFPDCYNHHYKKPGYNGSCFNVEIKRNDDLSWLWNESTALYPSIYLNTQQSPVAATLYVRNRVREAIRVSKIPDAKSPLPVFAYTRIVFTDQVLKFLSQDELVYTFGETVALGASGIVIWGSWENTRTKESCQAIKLYMDTTLNPYIINVTLAAKMCSQVLCQEQGVCIRKNWNSSDYLHLNPDNFAIQLEKGGKFTVRGKPTLEDLEQFSEKFYCSCYSTLSCKEKADVKDTDAVDVCIADGVCIDAF

SEQ ID NO: 193 - protein, 431 aa, Artificial Sequence
  Synthetic Construct
FRAPPVIPNVPFLWAWNAPSEFCLGKFDEPLDMSLFSFIGSPRINATGQGVTIFYVDRLGYYPYIDSITGVTVNGGIPQKISLQDHLDKAKKDITFYMPVDNLGMAVIDWEEWRPTWARNWKPKDVYKNRSIELVQQQNVQLSLTEATEKAKQEFEKAGKDFLVETIKLGKLLRPNHLWGYYLFPDCYNHHYKKPGYNGSCFNVEIKRNDDLSWLWNESTALYPSIYLNTQQSPVAATLYVRNRVREAIRVSKIPDAKSPLPVFAYTRIVFTDQVLKFLSQDELVYTFGETVALGASGIVIWGSWENTRTKESCQAIKQYMDTTLNPYIINVTLAAKMCSQVLCQEQGVCIRKNWNSSDYLHLNPDNFAIQLEKGGKFTVRGKPTLEDLEQFSEKFYCSCYSTLSCKEKADVKDTDAVDVCIADGVCIDAF

SEQ ID NO: 194 - protein, 431 aa, Artificial Sequence
  Synthetic Construct
FRAPPVIPNVPFLWAWNAPSEFCLGKFDEPLDMSLFSFIGSPRINATGQGVTIFYVDRLGYYPYIDSITGVTVNGGIPQKISLQDHLDKAKKDITFYMPVDNLGMAVIDWEEWRPTWARNWKPKDVYKNRSIELVQQQNVQLSLTEATEKAKQEFEKAGKDFLVETIKLGKLLRPNHLWGYYLFPDCYNHHYKKPGYNGSCFNVEIKRNDDLSWLWNESTALYPSIYLNTQQSPVAATLYVRNRVREAIRVSKIPDAKSPLPVFAYTRIVFTDQVLKFLSQDELVYTFGETVALGASGIVIWGSWENTRTKESCQAIKVYMDTTLNPYIINVTLAAKMCSQVLCQEQGVCIRKNWNSSDYLHLNPDNFAIQLEKGGKFTVRGKPTLEDLEQFSEKFYCSCYSTLSCKEKADVKDTDAVDVCIADGVCIDAF

SEQ ID NO: 195 - protein, 431 aa, Artificial Sequence
  Synthetic Construct
FRAPPVIPNVPFLWAWNAPSEFCLGKFDEPLDMSLFSFIGSPRINATGQGVTIFYVDRLGYYPYIDSITGVTVNGGIPQKISLQDHLDKAKKDITFYMPVDNLGMAVIDWEEWRPTWARNWKPKDVYKKRSIELVQQQNVQLSLTEATEKAKQEFEKAGKDFLVETIKLGKLLRPNHLWGYYLFPDCYNHHYKKPGYNGSCFNVEIKRNDDLSWLWNESTALYPSIYLNTQQSPVAATLYVRNRVREAIRVSKIPDAKSPLPVFAYTRIVFTDQVLKFLSQDELVYTFGETVALGASGIVIWGSWVNTRTKESCQAIKEYMDTMLNPYIINVTLAAKMCSQVLCQEQGVCIRKNWNSSDYLHLNPDNFAIQLEKGGKFTVRGKPTLEDLEQFSEKFYCSCYSTLSCKEKADVKDTDAVDVCIADGVCIDAF

SEQ ID NO: 196 - protein, 431 aa, Artificial Sequence
  Synthetic Construct
FRAPPVIPNVPFLWAWNAPSEFCLGKFDEPLDMSLFSFIGSPRINATGQGVTIFYVDRLGYYPYIDSITGVTVNGGIPQKISLQDHLDKAKKDITFYMPVDNLGMAVIDWEEWRPTWARNWKPKDVYKNRSIELVQQQNVQLSLTEATEKAKQEFEKAGKDFLVETIKLGKLLRPNHLWGYYLFPDCYNHHYKKPGYNGSCFNVEIKRNDDLSWLWNESTALYPSIYLNTQQSPVAATLYVRNRVREAIRVSKIPDAKSPLPVFAYTRIVFTDQVLKFLSQDELVYTFGETVALGASGIVIWQSWENTRTKESCQAIKEYMDTTLNPYIINVTLAAKMCSQVLCQEQGVCIRKNWNSSDYLHLNPDNFAIQLEKGGKFTVRGKPTLEDLEQFSEKFYCSCYSTLSCKEKADVKDTDAVDVCIADGVCIDAF

SEQ ID NO: 197 - protein, 431 aa, Artificial Sequence
  Synthetic Construct
FRAPPVIPNVPFLWAWNAPSEFCLGKFDEPLDMSLFSFIGSPRINATGQGVTIFYVDRLGYYPYIDSITGVTVNGGIPQKISLQDHLDKAKKDITFYMPVDNLGMAVIDWEEWRPTWARNWKPKDVYKNRSIELVQQQNVQLSLTEATEKAKQEFEKAGKDFLVETIKLGKLLRPNHLWGYYLFPDCYNHHYKKPGYNGSCFNVEIKRNDDLSWLWNESTALYPSIYLNTQQSPVAATLYVRNRVREAIRVSKIPDAKSPLPVFAYTRIVFTDQVLKFLSQDELVYTFGETVALGASGIVIWGHWENTRTKESCQAIKEYMDTTLNPYIINVTLAAKMCSQVLCQEQGVCIRKNWNSSDYLHLNPDNFAIQLEKGGKFTVRGKPTLEDLEQFSEKFYCSCYSTLSCKEKADVKDTDAVDVCIADGVCIDAF

SEQ ID NO: 198 - protein, 431 aa, Artificial Sequence
  Synthetic Construct
FRAPPVIPNVPFLWAWNAPSEFCLGKFDEPLDMSLFSFIGSPRINATGQGVTIFYVDRLGYYPYIDSITGVTVNGGIPQKISLQDHLDKAKKDITFYMPVDNLGMAVIDWEEWRPTWARNWKPKDVYKNRSIELVQQQNVQLSLTEATEKAKQEFEKAGKDFLVETIKLGKLLRPNHLWGYYLFPDCYNHHYKKPGYNGSCFNVEIKRNDDLSWLWNESTALYPSIYLNTQQSPVAATLYVRNRVREAIRVSKIPDAKSPLPVFAYTRIVFTDQVLKFLSQDELVYTFGETVALGASGIVIWGSIENTRTKESCQAIKEYMDTTLNPYIINVTLAAKMCSQVLCQEQGVCIRKNWNSSDYLHLNPDNFAIQLEKGGKFTVRGKPTLEDLEQFSEKFYCSCYSTLSCKEKADVKDTDAVDVCIADGVCIDAF

SEQ ID NO: 199 - protein, 431 aa, Artificial Sequence
  Synthetic Construct
FRAPPVIPNVPFLWAWNAPSEFCLGKFDEPLDMSLFSFIGSPRINATGQGVTIFYVDRLGYYPYIDSITGVTVNGGIPQKISLQDHLDKAKKDITFYMPVDNLGMAVIDWEEWRPTWARNWKPKDVYKNRSIELVQQQNVQLSLTEATEKAKQEFEKAGKDFLVETIKLGKLLRPNHLWGYYLFPDCYNHHYKKPGYNGSCFNVEIKRNDDLSWLWNESTALYPSIYLNTQQSPVAATLYVRNRVREAIRVSKIPDAKSPLPVFAYTRIVFTDQVLKFLSQDELVYTFGETVALGASGIVIWGSWYNTRTKESCQAIKEYMDTTLNPYIINVTLAAKMCSQVLCQEQGVCIRKNWNSSDYLHLNPDNFAIQLEKGGKFTVRGKPTLEDLEQFSEKFYCSCYSTLSCKEKADVKDTDAVDVCIADGVCIDAF

SEQ ID NO: 200 - protein, 431 aa, Artificial Sequence
  Synthetic Construct
FRAPPVIPNVPFLWAWNAPSEFCLGKFDEPLDMSLFSFIGSPRINATGQGVTIFYVDRLGYYPYIDSITGVTVNGGIPQKISLQDHLDKAKKDITFYMPVDNLGMAVIDWEEWRPTWARNWKPKDVYKNRSIELVQQQNVQLSLTEATEKAKQEFEKAGKDFLVETIKLGKLLRPNHLWGYYLFPDCYNHHYKKPGYNGSCFNVEIKRNDDLSWLWNESTALYPSIYLNTQQSPVAATLYVRNRVREAIRVSKIPDAKSPLPVFAYTRIVFTDQVLKFLSQDELVYTFGETVALGASGIVIWGSWENERTKESCQAIKEYMDTTLNPYIINVTLAAKMCSQVLCQEQGVCIRKNWNSSDYLHLNPDNFAIQLEKGGKFTVRGKPTLEDLEQFSEKFYCSCYSTLSCKEKADVKDTDAVDVCIADGVCIDAF

SEQ ID NO: 201 - protein, 431 aa, Artificial Sequence
  Synthetic Construct
FRAPPVIPNVPFLWAWNAPSEFCLGKFDEPLDMSLFSFIGSPRINATGQGVTIFYVDRLGYYPYIDSITGVTVNGGIPQKISLQDHLDKAKKDITFYMPVDNLGMAVIDWEEWRPTWARNWKPKDVYKNRSIELVQQQNVQLSLTEATEKAKQEFEKAGKDFLVETIKLGKLLRPNHLWGYYLFPDCYNHHYKKPGYNGSCFNVEIKRNDDLSWLWNESTALYPSIYLNTQQSPVAATLYVRNRVREAIRVSKIPDAKSPLPVFAYTRIVFTDQVLKFLSQDELVYTFGETVALGASGIVIWGSWENTFTKESCQAIKEYMDTTLNPYIINVTLAAKMCSQVLCQEQGVCIRKNWNSSDYLHLNPDNFAIQLEKGGKFTVRGKPTLEDLEQFSEKFYCSCYSTLSCKEKADVKDTDAVDVCIADGVCIDAF

SEQ ID NO: 202 - protein, 431 aa, Artificial Sequence
  Synthetic Construct
FRAPPVIPNVPFLWAWNAPSEFCLGKFDEPLDMSLFSFIGSPRINATGQGVTIFYVDRLGYYPYIDSITGVTVNGGIPQKISLQDHLDKAKKDITFYMPVDNLGMAVIDWEEWRPTWARNWKPKDVYKNRSIELVQQQNVQLSLTEATEKAKQEFEKAGKDFLVETIKLGKLLRPNHLWGYYLFPDCYNHHYKKPGYNGSCFNVEIKRNDDLSWLWNESTALYPSIYLNTQQSPVAATLYVRNRVREAIRVSKIPDAKSPLPVFAYTRIVFTDQVLKFLSQDELVYTFGETVALGASGIVIWGSWENTREKESCQAIKEYMDTTLNPYIINVTLAAKMCSQVLCQEQGVCIRKNWNSSDYLHLNPDNFAIQLEKGGKFTVRGKPTLEDLEQFSEKFYCSCYSTLSCKEKADVKDTDAVDVCIADGVCIDAF

SEQ ID NO: 203 - protein, 431 aa, Artificial Sequence
  Synthetic Construct
FRAPPVIPNVPFLWAWNAPSEFCLGKFDEPLDMSLFSFIGSPRINATGQGVTIFYVDRLGYYPYIDSITGVTVNGGIPQKISLQDHLDKAKKDITFYMPVDNLGMAVIDWEEWRPTWARNWKPKDVYKNRSIELVQQQNVQLSLTEATEKAKQEFEKAGKDFLVETIKLGKLLRPNHLWGYYLFPDCYNHHYKKPGYNGSCFNVEIKRNDDLSWLWNESTALYPSIYLNTQQSPVAATLYVRNRVREAIRVSKIPDAKSPLPVFAYTRIVFTDQVLKFLSQDELVYTFGETVALGASGIVIWGSWENTRTKLSCQAIKEYMDTTLNPYIINVTLAAKMCSQVLCQEQGVCIRKNWNSSDYLHLNPDNFAIQLEKGGKFTVRGKPTLEDLEQFSEKFYCSCYSTLSCKEKADVKDTDAVDVCIADGVCIDAF

SEQ ID NO: 204 - protein, 431 aa, Artificial Sequence
  Synthetic Construct
FRAPPVIPNVPFLWAWNAPSEFCLGKFDEPLDMSLFSFIGSPRINATGQGVTIFYVDRLGYYPYIDSITGVTVNGGIPQKISLQDHLDKAKKDITFYMPVDNLGMAVIDWEEWRPTWARNWKPKDVYKNRSIELVQQQNVQLSLTEATEKAKQEFEKAGKDFLVETIKLGKLLRPNHLWGYYLFPDCYNHHYKKPGYNGSCFNVEIKRNDDLSWLWNESTALYPSIYLNTQQSPVAATLYVRNRVREAIRVSKIPDAKSPLPVFAYTRIVFTDQVLKFLSQDELVYTFGETVALGASGIVIWGSWENTRTKEICQAIKEYMDTTLNPYIINVTLAAKMCSQVLCQEQGVCIRKNWNSSDYLHLNPDNFAIQLEKGGKFTVRGKPTLEDLEQFSEKFYCSCYSTLSCKEKADVKDTDAVDVCIADGVCIDAF

SEQ ID NO: 205 - protein, 431 aa, Artificial Sequence
  Synthetic Construct
FRAPPVIPNVPFLWAWNAPSEFCLGKFDEPLDMSLFSFIGSPRINATGQGVTIFYVDRLGYYPYIDSITGVTVNGGIPQKISLQDHLDKAKKDITFYMPVDNLGMAVIDWEEWRPTWARNWKPKDVYKNRSIELVQQQNVQLSLTEATEKAKQEFEKAGKDFLVETIKLGKLLRPNHLWGYYLFPDCYNHHYKKPGYNGSCFNVEIKRNDDLSWLWNESTALYPSIYLNTQQSPVAATLYVRNRVREAIRVSKIPDAKSPLPVFAYTRIVFTDQVLKFLSQDELVYTFGETVALGASGIVIWGSWENTRTKESCGAIKEYMDTTLNPYIINVTLAAKMCSQVLCQEQGVCIRKNWNSSDYLHLNPDNFAIQLEKGGKFTVRGKPTLEDLEQFSEKFYCSCYSTLSCKEKADVKDTDAVDVCIADGVCIDAF

SEQ ID NO: 206 - protein, 431 aa, Artificial Sequence
  Synthetic Construct
FRAPPVIPNVPFLWAWNAPSEFCLGKFDEPLDMSLFSFIGSPRINATGQGVTIFYVDRLGYYPYIDSITGVTVNGGIPQKISLQDHLDKAKKDITFYMPVDNLGMAVIDWEEWRPTWARNWKPKDVYKNRSIELVQQQNVQLSLTEATEKAKQEFEKAGKDFLVETIKLGKLLRPNHLWGYYLFPDCYNHHYKKPGYNGSCFNVEIKRNDDLSWLWNESTALYPSIYLNTQQSPVAATLYVRNRVREAIRVSKIPDAKSPLPVFAYTRIVFTDQVLKFLSQDELVYTFGETVALGASGIVIWGSWENTRTKESCQARKEYMDTTLNPYIINVTLAAKMCSQVLCQEQGVCIRKNWNSSDYLHLNPDNFAIQLEKGGKFTVRGKPTLEDLEQFSEKFYCSCYSTLSCKEKADVKDTDAVDVCIADGVCIDAF

SEQ ID NO: 207 - protein, 431 aa, Artificial Sequence
  Synthetic Construct
FRAPPVIPNVPFLWAWNAPSEFCLGKFDEPLDMSLFSFIGSPRINATGQGVTIFYVDRLGYYPYIDSITGVTVNGGIPQKISLQDHLDKAKKDITFYMPVDNLGMAVIDWEEWRPTWARNWKPKDVYKNRSIELVQQQNVQLSLTEATEKAKQEFEKAGKDFLVETIKLGKLLRPNHLWGYYLFPDCYNHHYKKPGYNGSCFNVEIKRNDDLSWLWNESTALYPSIYLNTQQSPVAATLYVRNRVREAIRVSKIPDAKSPLPVFAYTRIVFTDQVLKFLSQDELVYTFGETVALGASGIVIWGSWENTRTKESCQAIKEYRDTTLNPYIINVTLAAKMCSQVLCQEQGVCIRKNWNSSDYLHLNPDNFAIQLEKGGKFTVRGKPTLEDLEQFSEKFYCSCYSTLSCKEKADVKDTDAVDVCIADGVCIDAF

SEQ ID NO: 208 - protein, 431 aa, Artificial Sequence
  Synthetic Construct
FRAPPVIPNVPFLWAWNAPSEFCLGKFDEPLDMSLFSFIGSPRINATGQGVTIFYVDRLGYYPYIDSITGVTVNGGIPQKISLQDHLDKAKKDITFYMPVDNLGMAVIDWEEWRPTWARNWKPKDVYKNRSIELVQQQNVQLSLTEATEKAKQEFEKAGKDFLVETIKLGKLLRPNHLWGYYLFPDCYNHHYKKPGYNGSCFNVEIKRNDDLSWLWNESTALYPSIYLNTQQSPVAATLYVRNRVREAIRVSKIPDAKSPLPVFAYTRIVFTDQVLKFLSQDELVYTFGETVALGASGIVIWGSWENTRTKESCQAIKEYMVTTLNPYIINVTLAAKMCSQVLCQEQGVCIRKNWNSSDYLHLNPDNFAIQLEKGGKFTVRGKPTLEDLEQFSEKFYCSCYSTLSCKEKADVKDTDAVDVCIADGVCIDAF

SEQ ID NO: 209 - protein, 431 aa, Artificial Sequence
  Synthetic Construct
FRAPPVIPNVPFLWAWNAPSEFCLGKFDEPLDMSLFSFIGSPRINATGQGVTIFYVDRLGYYPYIDSITGVTVNGGIPQKISLQDHLDKAKKDITFYMPVDNLGMAVIDWEEWRPTWARNWKPKDVYKNRSIELVQQQNVQLSLTEATEKAKQEFEKAGKDFLVETIKLGKLLRPNHLWGYYLFPDCYNHHYKKPGYNGSCFNVEIKRNDDLSWLWNESTALYPSIYLNTQQSPVAATLYVRNRVREAIRVSKIPDAKSPLPVFAYTRIVFTDQVLKFLSQDELVYTFGETVALGASGIVIWGSWENTRTKESCQAIKEYMDRTLNPYIINVTLAAKMCSQVLCQEQGVCIRKNWNSSDYLHLNPDNFAIQLEKGGKFTVRGKPTLEDLEQFSEKFYCSCYSTLSCKEKADVKDTDAVDVCIADGVCIDAF

SEQ ID NO: 210 - protein, 431 aa, Artificial Sequence
  Synthetic Construct
FRAPPVIPNVPFLWAWNAPSEFCLGKFDEPLDMSLFSFIGSPRINATGQGVTIFYVDRLGYYPYIDSITGVTVNGGIPQKISLQDHLDKAKKDITFYMPVDNLGMAVIDWEEWRPTWARNWKPKDVYKNRSIELVQQQNVQLSLTEATEKAKQEFEKAGKDFLVETIKLGKLLRPNHLWGYYLFPDCYNHHYKKPGYNGSCFNVEIKRNDDLSWLWNESTALYPSIYLNTQQSPVAATLYVRNRVREAIRVSKIPDAKSPLPVFAYTRIVFTDQVLKFLSQDELVYTFGETVALGASGIVIWGSWENKRTKESCQAIKEYMDTTLNPYIINVTLAAKMCSQVLCQEQGVCIRKNWNSSDYLHLNPDNFAIQLEKGGKFTVRGKPTLEDLEQFSEKFYCSCYSTLSCKEKADVKDTDAVDVCIADGVCIDAF

SEQ ID NO: 211 - protein, 431 aa, Artificial Sequence
  Synthetic Construct
FRAPPVIPNVPFLWAWNAPSEFCLGKFDEPLDMSLFSFIGSPRINATGQGVTIFYVDRLGYYPYIDSITGVTVNGGIPQKISLQDHLDKAKKDITFYMPVDNLGMAVIDWEEWRPTWARNWKPKDVYKNRSIELVQQQNVQLSLTEATEKAKQEFEKAGKDFLVETIKLGKLLRPNHLWGYYLFPDCYNHHYKKPGYNGSCFNVEIKRNDDLSWLWNESTALYPSIYLNTQQSPVAATLYVRNRVREAIRVSKIPDAKSPLPVFAYTRIVFTDQVLKFLSQDELVYTFGETVALGASGIVIWGSWENTLTKESCQAIKEYMDTTLNPYIINVTLAAKMCSQVLCQEQGVCIRKNWNSSDYLHLNPDNFAIQLEKGGKFTVRGKPTLEDLEQFSEKFYCSCYSTLSCKEKADVKDTDAVDVCIADGVCIDAF

SEQ ID NO: 212 - protein, 431 aa, Artificial Sequence
  Synthetic Construct
FRAPPVIPNVPFLWAWNAPSEFCLGKFDEPLDMSLFSFIGSPRINATGQGVTIFYVDRLGYYPYIDSITGVTVNGGIPQKISLQDHLDKAKKDITFYMPVDNLGMAVIDWEEWRPTWARNWKPKDVYKNRSIELVQQQNVQLSLTEATEKAKQEFEKAGKDFLVETIKLGKLLRPNHLWGYYLFPDCYNHHYKKPGYNGSCFNVEIKRNDDLSWLWNESTALYPSIYLNTQQSPVAATLYVRNRVREAIRVSKIPDAKSPLPVFAYTRIVFTDQVLKFLSQDELVYTFGETVALGASGIVIWGSWENTRVKESCQAIKEYMDTTLNPYIINVTLAAKMCSQVLCQEQGVCIRKNWNSSDYLHLNPDNFAIQLEKGGKFTVRGKPTLEDLEQFSEKFYCSCYSTLSCKEKADVKDTDAVDVCIADGVCIDAF

SEQ ID NO: 213 - protein, 431 aa, Artificial Sequence
  Synthetic Construct
FRAPPVIPNVPFLWAWNAPSEFCLGKFDEPLDMSLFSFIGSPRINATGQGVTIFYVDRLGYYPYIDSITGVTVNGGIPQKISLQDHLDKAKKDITFYMPVDNLGMAVIDWEEWRPTWARNWKPKDVYKNRSIELVQQQNVQLSLTEATEKAKQEFEKAGKDFLVETIKLGKLLRPNHLWGYYLFPDCYNHHYKKPGYNGSCFNVEIKRNDDLSWLWNESTALYPSIYLNTQQSPVAATLYVRNRVREAIRVSKIPDAKSPLPVFAYTRIVFTDQVLKFLSQDELVYTFGETVALGASGIVIWGSWENTRTKWSCQAIKEYMDTTLNPYIINVTLAAKMCSQVLCQEQGVCIRKNWNSSDYLHLNPDNFAIQLEKGGKFTVRGKPTLEDLEQFSEKFYCSCYSTLSCKEKADVKDTDAVDVCIADGVCIDAF

SEQ ID NO: 214 - protein, 431 aa, Artificial Sequence
  Synthetic Construct
FRAPPVIPNVPFLWAWNAPSEFCLGKFDEPLDMSLFSFIGSPRINATGQGVTIFYVDRLGYYPYIDSITGVTVNGGIPQKISLQDHLDKAKKDITFYMPVDNLGMAVIDWEEWRPTWARNWKPKDVYKNRSIELVQQQNVQLSLTEATEKAKQEFEKAGKDFLVETIKLGKLLRPNHLWGYYLFPDCYNHHYKKPGYNGSCFNVEIKRNDDLSWLWNESTALYPSIYLNTQQSPVAATLYVRNRVREAIRVSKIPDAKSPLPVFAYTRIVFTDQVLKFLSQDELVYTFGETVALGASGIVIWGSWENTRTKESCQAWKEYMDTTLNPYIINVTLAAKMCSQVLCQEQGVCIRKNWNSSDYLHLNPDNFAIQLEKGGKFTVRGKPTLEDLEQFSEKFYCSCYSTLSCKEKADVKDTDAVDVCIADGVCIDAF

SEQ ID NO: 215 - protein, 431 aa, Artificial Sequence
  Synthetic Construct
FRAPPVIPNVPFLWAWNAPSEFCLGKFDEPLDMSLFSFIGSPRINATGQGVTIFYVDRLGYYPYIDSITGVTVNGGIPQKISLQDHLDKAKKDITFYMPVDNLGMAVIDWEEWRPTWARNWKPKDVYKNRSIELVQQQNVQLSLTEATEKAKQEFEKAGKDFLVETIKLGKLLRPNHLWGYYLFPDCYNHHYKKPGYNGSCFNVEIKRNDDLSWLWNESTALYPSIYLNTQQSPVAATLYVRNRVREAIRVSKIPDAKSPLPVFAYTRIVFTDQVLKFLSQDELVYTFGETVALGASGIVIWGSWENTRTKESCQAIKEYMYTTLNPYIINVTLAAKMCSQVLCQEQGVCIRKNWNSSDYLHLNPDNFAIQLEKGGKFTVRGKPTLEDLEQFSEKFYCSCYSTLSCKEKADVKDTDAVDVCIADGVCIDAF

SEQ ID NO: 216 - protein, 431 aa, Artificial Sequence
  Synthetic Construct
FRAPPVIPNVPFLWAWNAPSEFCLGKFDEPLDMSLFSFIGSPRINATGQGVTIFYVDRLGYYPYIDSITGVTVNGGIPQKISLQDHLDKAKKDITFYMPVDNLGMAVIDWEEWRPTWARNWKPKDVYKNRSIELVQQQNVQLSLTEATEKAKQEFEKAGKDFLVETIKLGKLLRPNHLWGYYLFPDCYNHHYKKPGYNGSCFNVEIKRNDDLSWLWNESTALYPSIYLNTQQSPVAATLYVRNRVREAIRVSKIPDAKSPLPVFAYTRIVFTDQVLKFLSQDELVYTFGETVALGASGIVIWGSWENTRWKESCQAIKEYMDTTLNPYIINVTLAAKMCSQVLCQEQGVCIRKNWNSSDYLHLNPDNFAIQLEKGGKFTVRGKPTLEDLEQFSEKFYCSCYSTLSCKEKADVKDTDAVDVCIADGVCIDAF

SEQ ID NO: 217 - protein, 431 aa, Artificial Sequence
  Synthetic Construct
FRAPPVIPNVPFLWAWNAPSEFCLGKFDEPLDMSLFSFIGSPRINATGQGVTIFYVDRLGYYPYIDSITGVTVNGGIPQKISLQDHLDKAKKDITFYMPVDNLGMAVIDWEEWRPTWARNWKPKDVYKNRSIELVQQQNVQLSLTEATEKAKQEFEKAGKDFLVETIKLGKLLRPNHLWGYYLFPDCYNHHYKKPGYNGSCFNVEIKRNDDLSWLWNESTALYPSIYLNTQQSPVAATLYVRNRVREAIRVSKIPDAKSPLPVFAYTRIVFTDQVLKFLSQDELVYTFGETVALGASGIVIWGSWENTRTKESCQAIKEWMDTTLNPYIINVTLAAKMCSQVLCQEQGVCIRKNWNSSDYLHLNPDNFAIQLEKGGKFTVRGKPTLEDLEQFSEKFYCSCYSTLSCKEKADVKDTDAVDVCIADGVCIDAF

SEQ ID NO: 218 - protein, 431 aa, Artificial Sequence
  Synthetic Construct
FRAPPVIPNVPFLWAWNAPSEFCLGKFDEPLDMSLFSFIGSPRINATGQGVTIFYVDRLGYYPYIDSITGVTVNGGIPQKISLQDHLDKAKKDITFYMPVDNLGMAVIDWEEWRPTWARNWKPKDVYKNRSIELVQQQNVQLSLTEATEKAKQEFEKAGKDFLVETIKLGKLLRPNHLWGYYLFPDCYNHHYKKPGYNGSCFNVEIKRNDDLSWLWNESTALYPSIYLNTQQSPVAATLYVRNRVREAIRVSKIPDAKSPLPVFAYTRIVFTDQVLKFLSQDELVYTFGETVALGASGIVIWGSDENTRTKESCQAIKEYMDTTLNPYIINVTLAAKMCSQVLCQEQGVCIRKNWNSSDYLHLNPDNFAIQLEKGGKFTVRGKPTLEDLEQFSEKFYCSCYSTLSCKEKADVKDTDAVDVCIADGVCIDAF

SEQ ID NO: 219 - protein, 431 aa, Artificial Sequence
  Synthetic Construct
FRAPPVIPNVPFLWAWNAPSEFCLGKFDEPLDMSLFSFIGSPRINATGQGVTIFYVDRLGYYPYIDSITGVTVNGGIPQKISLQDHLDKAKKDITFYMPVDNLGMAVIDWEEWRPTWARNWKPKDVYKNRSIELVQQQNVQLSLTEATEKAKQEFEKAGKDFLVETIKLGKLLRPNHLWGYYLFPDCYNHHYKKPGYNGSCFNVEIKRNDDLSWLWNESTALYPSIYLNTQQSPVAATLYVRNRVREAIRVSKIPDAKSPLPVFAYTRIVFTDQVLKFLSQDELVYTFGETVALGASGIVIWGSWQNTRTKESCQAIKEYMDTTLNPYIINVTLAAKMCSQVLCQEQGVCIRKNWNSSDYLHLNPDNFAIQLEKGGKFTVRGKPTLEDLEQFSEKFYCSCYSTLSCKEKADVKDTDAVDVCIADGVCIDAF

SEQ ID NO: 220 - protein, 431 aa, Artificial Sequence
  Synthetic Construct
FRAPPVIPNVPFLWAWNAPSEFCLGKFDEPLDMSLFSFIGSPRINATGQGVTIFYVDRLGYYPYIDSITGVTVNGGIPQKISLQDHLDKAKKDITFYMPVDNLGMAVIDWEEWRPTWARNWKPKDVYKNRSIELVQQQNVQLSLTEATEKAKQEFEKAGKDFLVETIKLGKLLRPNHLWGYYLFPDCYNHHYKKPGYNGSCFNVEIKRNDDLSWLWNESTALYPSIYLNTQQSPVAATLYVRNRVREAIRVSKIPDAKSPLPVFAYTRIVFTDQVLKFLSQDELVYTFGETVALGASGIVIWGSWENTRHKESCQAIKEYMDTTLNPYIINVTLAAKMCSQVLCQEQGVCIRKNWNSSDYLHLNPDNFAIQLEKGGKFTVRGKPTLEDLEQFSEKFYCSCYSTLSCKEKADVKDTDAVDVCIADGVCIDAF

SEQ ID NO: 221 - protein, 431 aa, Artificial Sequence
  Synthetic Construct
FRAPPVIPNVPFLWAWNAPSEFCLGKFDEPLDMSLFSFIGSPRINATGQGVTIFYVDRLGYYPYIDSITGVTVNGGIPQKISLQDHLDKAKKDITFYMPVDNLGMAVIDWEEWRPTWARNWKPKDVYKNRSIELVQQQNVQLSLTEATEKAKQEFEKAGKDFLVETIKLGKLLRPNHLWGYYLFPDCYNHHYKKPGYNGSCFNVEIKRNDDLSWLWNESTALYPSIYLNTQQSPVAATLYVRNRVREAIRVSKIPDAKSPLPVFAYTRIVFTDQVLKFLSQDELVYTFGETVALGASGIVIWGSWENTRTFESCQAIKEYMDTTLNPYIINVTLAAKMCSQVLCQEQGVCIRKNWNSSDYLHLNPDNFAIQLEKGGKFTVRGKPTLEDLEQFSEKFYCSCYSTLSCKEKADVKDTDAVDVCIADGVCIDAF

SEQ ID NO: 222 - protein, 431 aa, Artificial Sequence
  Synthetic Construct
FRAPPVIPNVPFLWAWNAPSEFCLGKFDEPLDMSLFSFIGSPRINATGQGVTIFYVDRLGYYPYIDSITGVTVNGGIPQKISLQDHLDKAKKDITFYMPVDNLGMAVIDWEEWRPTWARNWKPKDVYKNRSIELVQQQNVQLSLTEATEKAKQEFEKAGKDFLVETIKLGKLLRPNHLWGYYLFPDCYNHHYKKPGYNGSCFNVEIKRNDDLSWLWNESTALYPSIYLNTQQSPVAATLYVRNRVREAIRVSKIPDAKSPLPVFAYTRIVFTDQVLKFLSQDELVYTFGETVALGASGIVIWGSWENTRTKEDCQAIKEYMDTTLNPYIINVTLAAKMCSQVLCQEQGVCIRKNWNSSDYLHLNPDNFAIQLEKGGKFTVRGKPTLEDLEQFSEKFYCSCYSTLSCKEKADVKDTDAVDVCIADGVCIDAF

SEQ ID NO: 223 - protein, 431 aa, Artificial Sequence
  Synthetic Construct
FRAPPVIPNVPFLWAWNAPSEFCLGKFDEPLDMSLFSFIGSPRINATGQGVTIFYVDRLGYYPYIDSITGVTVNGGIPQKISLQDHLDKAKKDITFYMPVDNLGMAVIDWEEWRPTWARNWKPKDVYKNRSIELVQQQNVQLSLTEATEKAKQEFEKAGKDFLVETIKLGKLLRPNHLWGYYLFPDCYNHHYKKPGYNGSCFNVEIKRNDDLSWLWNESTALYPSIYLNTQQSPVAATLYVRNRVREAIRVSKIPDAKSPLPVFAYTRIVFTDQVLKFLSQDELVYTFGETVALGASGIVIWGSWENTRTKESCYAIKEYMDTTLNPYIINVTLAAKMCSQVLCQEQGVCIRKNWNSSDYLHLNPDNFAIQLEKGGKFTVRGKPTLEDLEQFSEKFYCSCYSTLSCKEKADVKDTDAVDVCIADGVCIDAF

SEQ ID NO: 224 - protein, 431 aa, Artificial Sequence
  Synthetic Construct
FRAPPVIPNVPFLWAWNAPSEFCLGKFDEPLDMSLFSFIGSPRINATGQGVTIFYVDRLGYYPYIDSITGVTVNGGIPQKISLQDHLDKAKKDITFYMPVDNLGMAVIDWEEWRPTWARNWKPKDVYKNRSIELVQQQNVQLSLTEATEKAKQEFEKAGKDFLVETIKLGKLLRPNHLWGYYLFPDCYNHHYKKPGYNGSCFNVEIKRNDDLSWLWNESTALYPSIYLNTQQSPVAATLYVRNRVREAIRVSKIPDAKSPLPVFAYTRIVFTDQVLKFLSQDELVYTFGETVALGASGIVIWGSWENTRTKESCQEIKEYMDTTLNPYIINVTLAAKMCSQVLCQEQGVCIRKNWNSSDYLHLNPDNFAIQLEKGGKFTVRGKPTLEDLEQFSEKFYCSCYSTLSCKEKADVKDTDAVDVCIADGVCIDAF

SEQ ID NO: 225 - protein, 431 aa, Artificial Sequence
  Synthetic Construct
FRAPPVIPNVPFLWAWNAPSEFCLGKFDEPLDMSLFSFIGSPRINATGQGVTIFYVDRLGYYPYIDSITGVTVNGGIPQKISLQDHLDKAKKDITFYMPVDNLGMAVIDWEEWRPTWARNWKPKDVYKNRSIELVQQQNVQLSLTEATEKAKQEFEKAGKDFLVETIKLGKLLRPNHLWGYYLFPDCYNHHYKKPGYNGSCFNVEIKRNDDLSWLWNESTALYPSIYLNTQQSPVAATLYVRNRVREAIRVSKIPDAKSPLPVFAYTRIVFTDQVLKFLSQDELVYTFGETVALGASGIVIWGSWENTRTKESCQAIKEYYDTTLNPYIINVTLAAKMCSQVLCQEQGVCIRKNWNSSDYLHLNPDNFAIQLEKGGKFTVRGKPTLEDLEQFSEKFYCSCYSTLSCKEKADVKDTDAVDVCIADGVCIDAF

SEQ ID NO: 226 - protein, 431 aa, Artificial Sequence
  Synthetic Construct
FRAPPVIPNVPFLWAWNAPSEFCLGKFDEPLDMSLFSFIGSPRINATGQGVTIFYVDRLGYYPYIDSITGVTVNGGIPQKISLQDHLDKAKKDITFYMPVDNLGMAVIDWEEWRPTWARNWKPKDVYKNRSIELVQQQNVQLSLTEATEKAKQEFEKAGKDFLVETIKLGKLLRPNHLWGYYLFPDCYNHHYKKPGYNGSCFNVEIKRNDDLSWLWNESTALYPSIYLNTQQSPVAATLYVRNRVREAIRVSKIPDAKSPLPVFAYTRIVFTDQVLKFLSQDELVYTFGETVALGASGIVIWGSWENTRTKESCQAIKEYMQTTLNPYIINVTLAAKMCSQVLCQEQGVCIRKNWNSSDYLHLNPDNFAIQLEKGGKFTVRGKPTLEDLEQFSEKFYCSCYSTLSCKEKADVKDTDAVDVCIADGVCIDAF

SEQ ID NO: 227 - protein, 431 aa, Artificial Sequence
  Synthetic Construct
FRAPPVIPNVPFLWAWNAPSEFCLGKFDEPLDMSLFSFIGSPRINATGQGVTIFYVDRLGYYPYIDSITGVTVNGGIPQKISLQDHLDKAKKDITFYMPVDNLGMAVIDWEEWRPTWARNWKPKDVYKNRSIELVQQQNVQLSLTEATEKAKQEFEKAGKDFLVETIKLGKLLRPNHLWGYYLFPDCYNHHYKKPGYNGSCFNVEIKRNDDLSWLWNESTALYPSIYLNTQQSPVAATLYVRNRVREAIRVSKIPDAKSPLPVFAYTRIVFTDQVLKFLSQDELVYTFGETVALGASGIVIWGSWENTRTKESCQAIKEYMDLTLNPYIINVTLAAKMCSQVLCQEQGVCIRKNWNSSDYLHLNPDNFAIQLEKGGKFTVRGKPTLEDLEQFSEKFYCSCYSTLSCKEKADVKDTDAVDVCIADGVCIDAF

SEQ ID NO: 228 - protein, 431 aa, Artificial Sequence
  Synthetic Construct
FRAPPVIPNVPFLWAWNAPSEFCLGKFDEPLDMSLFSFIGSPRINATGQGVTIFYVDRLGYYPYIDSITGVTVNGGIPQKISLQDHLDKAKKDITFYMPVDNLGMAVIDWEEWRPTWARNWKPKDVYKNRSIELVQQQNVQLSLTEATEKAKQEFEKAGKDFLVETIKLGKLLRPNHLWGYYLFPDCYNHHYKKPGYNGSCFNVEIKRNDDLSWLWNESTALYPSIYLNTQQSPVAATLYVRNRVREAIRVSKIPDAKSPLPVFAYTRIVFTDQVLKFLSQDELVYTFGETVALGASGIVIWGSWENTRTKESCQAIKEYMDTELNPYIINVTLAAKMCSQVLCQEQGVCIRKNWNSSDYLHLNPDNFAIQLEKGGKFTVRGKPTLEDLEQFSEKFYCSCYSTLSCKEKADVKDTDAVDVCIADGVCIDAF

SEQ ID NO: 229 - protein, 431 aa, Artificial Sequence
  Synthetic Construct
FRAPPVIPNVPFLWAWNAPSEFCLGKFDEPLDMSLFSFIGSPRINATGQGVTIFYVDRLGYYPYIDSITGVTVNGGIPQKISLQDHLDKAKKDITFYMPVDNLGMAVIDWEEWRPTWARNWKPKDVYKNRSIELVQQQNVQLSLTEATEKAKQEFEKAGKDFLVETIKLGKLLRPNHLWGYYLFPDCYNHHYKKPGYNGSCFNVEIKRNDDLSWLWNESTALYPSIYLNTQQSPVAATLYVRNRVREAIRVSKIPDAKSPLPVFAYTRIVFTDQVLKFLSQDELVYTFGETVALGASGIVIWGSWENTRTKESCQAIKEYMDTTLEPYIINVTLAAKMCSQVLCQEQGVCIRKNWNSSDYLHLNPDNFAIQLEKGGKFTVRGKPTLEDLEQFSEKFYCSCYSTLSCKEKADVKDTDAVDVCIADGVCIDAF

SEQ ID NO: 230 - protein, 431 aa, Artificial Sequence
  Synthetic Construct
FRAPPVIPNVPFLWAWNAPSEFCLGKFDEPLDMSLFSFIGSPRINATGQGVTIFYVDRLGYYPYIDSITGVTVNGGIPQKISLQDHLDKAKKDITFYMPVDNLGMAVIDWEEWRPTWARNWKPKDVYKNRSIELVQQQNVQLSLTEATEKAKQEFEKAGKDFLVETIKLGKLLRPNHLWGYYLFPDCYNHHYKKPGYNGSCFNVEIKRNDDLSWLWNESTALYPSIYLNTQQSPVAATLYVRNRVREAIRVSKIPDAKSPLPVFAYTRIVFTDQVLKFLSQDELVYTFGETVALGASGIVIWGSHENTRTKESCQAIKEYMDTTLNPYIINVTLAAKMCSQVLCQEQGVCIRKNWNSSDYLHLNPDNFAIQLEKGGKFTVRGKPTLEDLEQFSEKFYCSCYSTLSCKEKADVKDTDAVDVCIADGVCIDAF

SEQ ID NO: 231 - protein, 431 aa, Artificial Sequence
  Synthetic Construct
FRAPPVIPNVPFLWAWNAPSEFCLGKFDEPLDMSLFSFIGSPRINATGQGVTIFYVDRLGYYPYIDSITGVTVNGGIPQKISLQDHLDKAKKDITFYMPVDNLGMAVIDWEEWRPTWARNWKPKDVYKNRSIELVQQQNVQLSLTEATEKAKQEFEKAGKDFLVETIKLGKLLRPNHLWGYYLFPDCYNHHYKKPGYNGSCFNVEIKRNDDLSWLWNESTALYPSIYLNTQQSPVAATLYVRNRVREAIRVSKIPDAKSPLPVFAYTRIVFTDQVLKFLSQDELVYTFGETVALGASGIVIWGSWENTRTDESCQAIKEYMDTTLNPYIINVTLAAKMCSQVLCQEQGVCIRKNWNSSDYLHLNPDNFAIQLEKGGKFTVRGKPTLEDLEQFSEKFYCSCYSTLSCKEKADVKDTDAVDVCIADGVCIDAF

SEQ ID NO: 232 - protein, 431 aa, Artificial Sequence
  Synthetic Construct
FRAPPVIPNVPFLWAWNAPSEFCLGKFDEPLDMSLFSFIGSPRINATGQGVTIFYVDRLGYYPYIDSITGVTVNGGIPQKISLQDHLDKAKKDITFYMPVDNLGMAVIDWEEWRPTWARNWKPKDVYKNRSIELVQQQNVQLSLTEATEKAKQEFEKAGKDFLVETIKLGKLLRPNHLWGYYLFPDCYNHHYKKPGYNGSCFNVEIKRNDDLSWLWNESTALYPSIYLNTQQSPVAATLYVRNRVREAIRVSKIPDAKSPLPVFAYTRIVFTDQVLKFLSQDELVYTFGETVALGASGIVIWGSWENTRTKESCQAIKEYMDTHLNPYIINVTLAAKMCSQVLCQEQGVCIRKNWNSSDYLHLNPDNFAIQLEKGGKFTVRGKPTLEDLEQFSEKFYCSCYSTLSCKEKADVKDTDAVDVCIADGVCIDAF

SEQ ID NO: 233 - protein, 430 aa, Artificial Sequence
  Synthetic Construct
RAPPVIPNVPFLWAWNAPSEFCLGKFDEPLDMSLFSFIGSPRINATGQGVTIFYVDRLGYYPYIDSITGVTVNGGIPQKISLQDHLDKAKKDITFYMPVDNLGMAVIDWEEWRPTWARNWKPKDVYKNRSIELVQQQNVQLSLTEATEKAKQEFEKAGKDFLVETIKLGKLLRPNHLWGYYLFPDCYNHHYKKPGYNGSCFNVEIKRNDDLSWLWNESTALYPSIYLNTQQSPVAATLYVRNRVREAIRVSKIPDAKSPLPVFAYTRIVFTDQVLKFLSQDELVYTFGETVALGASGIVIWGSWENTRTKESCQAIKEYMDTTLNPYIINVTLAAKMCSQVLCQEQGVCIRKNWNSSDYLHLNPDNFAIQLEKGGKFTVRGKPTLEDLEQFSEKFYCSCYSTLSCKEKADVKDTDAVDVCIADGVCIDAF

SEQ ID NO: 234 - protein, 429 aa, Artificial Sequence
  Synthetic Construct
APPVIPNVPFLWAWNAPSEFCLGKFDEPLDMSLFSFIGSPRINATGQGVTIFYVDRLGYYPYIDSITGVTVNGGIPQKISLQDHLDKAKKDITFYMPVDNLGMAVIDWEEWRPTWARNWKPKDVYKNRSIELVQQQNVQLSLTEATEKAKQEFEKAGKDFLVETIKLGKLLRPNHLWGYYLFPDCYNHHYKKPGYNGSCFNVEIKRNDDLSWLWNESTALYPSIYLNTQQSPVAATLYVRNRVREAIRVSKIPDAKSPLPVFAYTRIVFTDQVLKFLSQDELVYTFGETVALGASGIVIWGSWENTRTKESCQAIKEYMDTTLNPYIINVTLAAKMCSQVLCQEQGVCIRKNWNSSDYLHLNPDNFAIQLEKGGKFTVRGKPTLEDLEQFSEKFYCSCYSTLSCKEKADVKDTDAVDVCIADGVCIDAF

SEQ ID NO: 235 - protein, 419 aa, Artificial Sequence
  Synthetic Construct
FRAPPVIPNVPFLWAWNAPSEFCLGKFDEPLDMSLFSFIGSPRINATGQGVTIFYVDRLGYYPYIDSITGVTVNGGIPQKISLQDHLDKAKKDITFYMPVDNLGMAVIDWEEWRPTWARNWKPKDVYKNRSIELVQQQNVQLSLTEATEKAKQEFEKAGKDFLVETIKLGKLLRPNHLWGYYLFPDCYNHHYKKPGYNGSCFNVEIKRNDDLSWLWNESTALYPSIYLNTQQSPVAATLYVRNRVREAIRVSKIPDAKSPLPVFAYTRIVFTDQVLKFLSQDELVYTFGETVALGASGIVIWGSWENTRTKESCQAIKEYMDTTLNPYIINVTLAAKMCSQVLCQEQGVCIRKNWNSSDYLHLNPDNFAIQLEKGGKFTVRGKPTLEDLEQFSEKFYCSCYSTLSCKEKADVKDTDAVD

SEQ ID NO: 236 - protein, 430 aa, Artificial Sequence
  Synthetic Construct
RAPPVIPNVPFLWAWNAPSEFCLGKFDEPLDMSLFSFIGSPRINATGQGVTIFYVDRLGYYPYIDSITGVTVNGGIPQKISLQDHLDKAKKDITFYMPVDNLGMAVIDWEEWRPTWARNWKPKDVYKNRSIELVQQQNVQLSLTEATEKAKQEFEKAGKDFLVETIKLGKLLRPNHLWGYYLFPDCYNHHYKKPGYNGSCFNVEIKRNDDLSWLWNESTALYPSIYLNTQQSPVAATLYVRNRVREAIRVSKIPDAKSPLPVFAYTRIVFTDQVLKFLSQDELVYTFGETVALGASGIVIWGSWENTRTKEQCQAIKEYMDRTLNPYIINVTLAAKMCSQVLCQEQGVCIRKNWNSSDYLHLNPDNFAIQLEKGGKFTVRGKPTLEDLEQFSEKFYCSCYSTLSCKEKADVKDTDAVDVCIADGVCIDAF

SEQ ID NO: 237 - protein, 431 aa, Artificial Sequence
  Synthetic Construct
FRAPPVIPNVPFLWAWNAPSEFCLGKFAEPLDMSLFSFIGSPRINATGQGVTIFYVDRLGYYPYIDSITGVTVNGGIPQKISLQDHLDKAKKDITFYMPVDNLGMAVIDWEEWRPTWARNWKPKDVYKNRSIELVQQQNVQLSLTEATEKAKQEFEKAGKDFLVETIKLGKLLRPNHLWGYYLFPDCYNHHYKKPGYNGSCFNVEIKRNDDLSWLWNESTALYPSIYLNTQQSPVAATLYVRNRVREAIRVSKIPDAKSPLPVFAYTRIVFTDQVLKFLSQDELVYTFGETVALGASGIVIWGSWENTRTKESCQAIKEYMDTTLNPYIINVTLAAKMCSQVLCQEQGVCIRKNWNSSDYLHLNPDNFAIQLEKGGKFTVRGKPTLEDLEQFSEKFYCSCYSTLSCKEKADVKDTDAVDVCIADGVCIDAF

SEQ ID NO: 238 - protein, 431 aa, Artificial Sequence
  Synthetic Construct
FRAPPVIPNVPFLWAWNAPSEFCLGKFDAPLDMSLFSFIGSPRINATGQGVTIFYVDRLGYYPYIDSITGVTVNGGIPQKISLQDHLDKAKKDITFYMPVDNLGMAVIDWEEWRPTWARNWKPKDVYKNRSIELVQQQNVQLSLTEATEKAKQEFEKAGKDFLVETIKLGKLLRPNHLWGYYLFPDCYNHHYKKPGYNGSCFNVEIKRNDDLSWLWNESTALYPSIYLNTQQSPVAATLYVRNRVREAIRVSKIPDAKSPLPVFAYTRIVFTDQVLKFLSQDELVYTFGETVALGASGIVIWGSWENTRTKESCQAIKEYMDTTLNPYIINVTLAAKMCSQVLCQEQGVCIRKNWNSSDYLHLNPDNFAIQLEKGGKFTVRGKPTLEDLEQFSEKFYCSCYSTLSCKEKADVKDTDAVDVCIADGVCIDAF

SEQ ID NO: 239 - protein, 431 aa, Artificial Sequence
  Synthetic Construct
FRAPPVIPNVPFLWAWNAPSEFCLGKFDEALDMSLFSFIGSPRINATGQGVTIFYVDRLGYYPYIDSITGVTVNGGIPQKISLQDHLDKAKKDITFYMPVDNLGMAVIDWEEWRPTWARNWKPKDVYKNRSIELVQQQNVQLSLTEATEKAKQEFEKAGKDFLVETIKLGKLLRPNHLWGYYLFPDCYNHHYKKPGYNGSCFNVEIKRNDDLSWLWNESTALYPSIYLNTQQSPVAATLYVRNRVREAIRVSKIPDAKSPLPVFAYTRIVFTDQVLKFLSQDELVYTFGETVALGASGIVIWGSWENTRTKESCQAIKEYMDTTLNPYIINVTLAAKMCSQVLCQEQGVCIRKNWNSSDYLHLNPDNFAIQLEKGGKFTVRGKPTLEDLEQFSEKFYCSCYSTLSCKEKADVKDTDAVDVCIADGVCIDAF

SEQ ID NO: 240 - protein, 431 aa, Artificial Sequence
  Synthetic Construct
FRAPPVIPNVPFLWAWNAPSEFCLGKFDEPADMSLFSFIGSPRINATGQGVTIFYVDRLGYYPYIDSITGVTVNGGIPQKISLQDHLDKAKKDITFYMPVDNLGMAVIDWEEWRPTWARNWKPKDVYKNRSIELVQQQNVQLSLTEATEKAKQEFEKAGKDFLVETIKLGKLLRPNHLWGYYLFPDCYNHHYKKPGYNGSCFNVEIKRNDDLSWLWNESTALYPSIYLNTQQSPVAATLYVRNRVREAIRVSKIPDAKSPLPVFAYTRIVFTDQVLKFLSQDELVYTFGETVALGASGIVIWGSWENTRTKESCQAIKEYMDTTLNPYIINVTLAAKMCSQVLCQEQGVCIRKNWNSSDYLHLNPDNFAIQLEKGGKFTVRGKPTLEDLEQFSEKFYCSCYSTLSCKEKADVKDTDAVDVCIADGVCIDAF

SEQ ID NO: 241 - protein, 431 aa, Artificial Sequence
  Synthetic Construct
FRAPPVIPNVPFLWAWNAPSEFCLGKFDEPLDMSLFSFIGSPRINATGQGVTIFYVDRLGYYPYIDSITGVTVNGGIPQKISLQDHLDKAKKDITFYMPVDNLGMAVIDWEEWRPTWARNWKPKDVYKNRSIELVQQQNVQLSLTEATEKAKQEFEKAGKDFLVETIKLGKLLRPNHLWGYYLFPDCYNHHYKKPGYNGSCFNVEIKRNDDLSWLWNESTALYPSIYLNTQQSPVAATLYVRNRVREAIRVSKIPDAKSPLPVFAYTRIVFTDAVLKFLSQDELVYTFGETVALGASGIVIWGSWENTRTKESCQAIKEYMDTTLNPYIINVTLAAKMCSQVLCQEQGVCIRKNWNSSDYLHLNPDNFAIQLEKGGKFTVRGKPTLEDLEQFSEKFYCSCYSTLSCKEKADVKDTDAVDVCIADGVCIDAF

SEQ ID NO: 242 - protein, 431 aa, Artificial Sequence
  Synthetic Construct
FRAPPVIPNVPFLWAWNAPSEFCLGKFDEPLDMSLFSFIGSPRINATGQGVTIFYVDRLGYYPYIDSITGVTVNGGIPQKISLQDHLDKAKKDITFYMPVDNLGMAVIDWEEWRPTWARNWKPKDVYKNRSIELVQQQNVQLSLTEATEKAKQEFEKAGKDFLVETIKLGKLLRPNHLWGYYLFPDCYNHHYKKPGYNGSCFNVEIKRNDDLSWLWNESTALYPSIYLNTQQSPVAATLYVRNRVREAIRVSKIPDAKSPLPVFAYTRIVFTDQALKFLSQDELVYTFGETVALGASGIVIWGSWENTRTKESCQAIKEYMDTTLNPYIINVTLAAKMCSQVLCQEQGVCIRKNWNSSDYLHLNPDNFAIQLEKGGKFTVRGKPTLEDLEQFSEKFYCSCYSTLSCKEKADVKDTDAVDVCIADGVCIDAF

SEQ ID NO: 243 - protein, 431 aa, Artificial Sequence
  Synthetic Construct
FRAPPVIPNVPFLWAWNAPSEFCLGKFDEPLDMSLFSFIGSPRINATGQGVTIFYVDRLGYYPYIDSITGVTVNGGIPQKISLQDHLDKAKKDITFYMPVDNLGMAVIDWEEWRPTWARNWKPKDVYKNRSIELVQQQNVQLSLTEATEKAKQEFEKAGKDFLVETIKLGKLLRPNHLWGYYLFPDCYNHHYKKPGYNGSCFNVEIKRNDDLSWLWNESTALYPSIYLNTQQSPVAATLYVRNRVREAIRVSKIPDAKSPLPVFAYTRIVFTDQVAKFLSQDELVYTFGETVALGASGIVIWGSWENTRTKESCQAIKEYMDTTLNPYIINVTLAAKMCSQVLCQEQGVCIRKNWNSSDYLHLNPDNFAIQLEKGGKFTVRGKPTLEDLEQFSEKFYCSCYSTLSCKEKADVKDTDAVDVCIADGVCIDAF

SEQ ID NO: 244 - protein, 431 aa, Artificial Sequence
  Synthetic Construct
FRAPPVIPNVPFLWAWNAPSEFCLGKFDEPLDMSLFSFIGSPRINATGQGVTIFYVDRLGYYPYIDSITGVTVNGGIPQKISLQDHLDKAKKDITFYMPVDNLGMAVIDWEEWRPTWARNWKPKDVYKNRSIELVQQQNVQLSLTEATEKAKQEFEKAGKDFLVETIKLGKLLRPNHLWGYYLFPDCYNHHYKKPGYNGSCFNVEIKRNDDLSWLWNESTALYPSIYLNTQQSPVAATLYVRNRVREAIRVSKIPDAKSPLPVFAYTRIVFTDQVLAFLSQDELVYTFGETVALGASGIVIWGSWENTRTKESCQAIKEYMDTTLNPYIINVTLAAKMCSQVLCQEQGVCIRKNWNSSDYLHLNPDNFAIQLEKGGKFTVRGKPTLEDLEQFSEKFYCSCYSTLSCKEKADVKDTDAVDVCIADGVCIDAF

SEQ ID NO: 245 - protein, 431 aa, Artificial Sequence
  Synthetic Construct
FRAPPVIPNVPFLWAWNAPSEFCLGKFDEPLDMSLFSFIGSPRINATGQGVTIFYVDRLGYYPYIDSITGVTVNGGIPQKISLQDHLDKAKKDITFYMPVDNLGMAVIDWEEWRPTWARNWKPKDVYKNRSIELVQQQNVQLSLTEATEKAKQEFEKAGKDFLVETIKLGKLLRPNHLWGYYLFPDCYNHHYKKPGYNGSCFNVEIKRNDDLSWLWNESTALYPSIYLATQQSPVAATLYVRNRVREAIRVSKIPDAKSPLPVFAYTRIVFTDQVLKFLSQDELVYTFGETVALGASGIVIWGSWENTRTKESCQAIKEYMDTTLNPYIINVTLAAKMCSQVLCQEQGVCIRKNWNSSDYLHLNPDNFAIQLEKGGKFTVRGKPTLEDLEQFSEKFYCSCYSTLSCKEKADVKDTDAVDVCIADGVCIDAF

SEQ ID NO: 246 - protein, 431 aa, Artificial Sequence
  Synthetic Construct
FRAPPVIPNVPFLWAWNAPSEFCLGKFDEPLDMSLFSFIGSPRINATGQGVTIFYVDRLGYYPYIDSITGVTVNGGIPQKISLQDHLDKAKKDITFYMPVDNLGMAVIDWEEWRPTWARNWKPKDVYKNRSIELVQQQNVQLSLTEATEKAKQEFEKAGKDFLVETIKLGKLLRPNHLWGYYLFPDCYNHHYKKPGYNGSCFNVEIKRNDDLSWLWNESTALYPSIYLNAQQSPVAATLYVRNRVREAIRVSKIPDAKSPLPVFAYTRIVFTDQVLKFLSQDELVYTFGETVALGASGIVIWGSWENTRTKESCQAIKEYMDTTLNPYIINVTLAAKMCSQVLCQEQGVCIRKNWNSSDYLHLNPDNFAIQLEKGGKFTVRGKPTLEDLEQFSEKFYCSCYSTLSCKEKADVKDTDAVDVCIADGVCIDAF

SEQ ID NO: 247 - protein, 431 aa, Artificial Sequence
  Synthetic Construct
FRAPPVIPNVPFLWAWNAPSEFCLGKFDEPLDMSLFSFIGSPRINATGQGVTIFYVDRLGYYPYIDSITGVTVNGGIPQKISLQDHLDKAKKDITFYMPVDNLGMAVIDWEEWRPTWARNWKPKDVYKNRSIELVQQQNVQLSLTEATEKAKQEFEKAGKDFLVETIKLGKLLRPNHLWGYYLFPDCYNHHYKKPGYNGSCFNVEIKRNDDLSWLWNESTALYPSIYLNTAQSPVAATLYVRNRVREAIRVSKIPDAKSPLPVFAYTRIVFTDQVLKFLSQDELVYTFGETVALGASGIVIWGSWENTRTKESCQAIKEYMDTTLNPYIINVTLAAKMCSQVLCQEQGVCIRKNWNSSDYLHLNPDNFAIQLEKGGKFTVRGKPTLEDLEQFSEKFYCSCYSTLSCKEKADVKDTDAVDVCIADGVCIDAF

SEQ ID NO: 248 - protein, 431 aa, Artificial Sequence
  Synthetic Construct
FRAPPVIPNVPFLWAWNAPSEFCLGKFDEPLDMSLFSFIGSPRINATGQGVTIFYVDRLGYYPYIDSITGVTVNGGIPQKISLQDHLDKAKKDITFYMPVDNLGMAVIDWEEWRPTWARNWKPKDVYKNRSIELVQQQNVQLSLTEATEKAKQEFEKAGKDFLVETIKLGKLLRPNHLWGYYLFPDCYNHHYKKPGYNGSCFNVEIKRNDDLSWLWNESTALYPSIYLNTQASPVAATLYVRNRVREAIRVSKIPDAKSPLPVFAYTRIVFTDQVLKFLSQDELVYTFGETVALGASGIVIWGSWENTRTKESCQAIKEYMDTTLNPYIINVTLAAKMCSQVLCQEQGVCIRKNWNSSDYLHLNPDNFAIQLEKGGKFTVRGKPTLEDLEQFSEKFYCSCYSTLSCKEKADVKDTDAVDVCIADGVCIDAF

SEQ ID NO: 249 - protein, 431 aa, Artificial Sequence
  Synthetic Construct
FRAPPVIPNVPFLWAWNAPSEFCLGKFDEPLDMSLFSFIGSPRINATGQGVTIFYVDRLGYYPYIDSITGVTVNGGIPQKISLQDHLDKAKKDITFYMPVDNLGMAVIDWEEWRPTWARNWKPKDVYKNRSIELVQQQNVQLSLTEATEKAKQEFEKAGKDFLVETIKLGKLLRPNHLWGYYLFPDCYNHHYKKPGYNGSCFNVEIKRNDDLSWLWNESTALYPSIYLNTQQSAVAATLYVRNRVREAIRVSKIPDAKSPLPVFAYTRIVFTDQVLKFLSQDELVYTFGETVALGASGIVIWGSWENTRTKESCQAIKEYMDTTLNPYIINVTLAAKMCSQVLCQEQGVCIRKNWNSSDYLHLNPDNFAIQLEKGGKFTVRGKPTLEDLEQFSEKFYCSCYSTLSCKEKADVKDTDAVDVCIADGVCIDAF

SEQ ID NO: 250 - protein, 431 aa, Artificial Sequence
  Synthetic Construct
FRAPPVIPNVPFLWAWNAPSEFCLGKFDEPLDMSLFSFIGSPRINATGQGVTIFYVDRLGYYPYIDSITGVTVNGGIPQKISLQDHLDKAKKDITFYMPVDNLGMAVIDWEEWRPTWARNWKPKDVYKNRSIELVQQQNVQLSLTEATEKAKQEFEKAGKDFLVETIKLGKLLRPNHLWGYYLFPDCYNHHYKKPGYNGSCFNVEIKRNDDLSWLWNESTALYPSIYLNTQQSPAAATLYVRNRVREAIRVSKIPDAKSPLPVFAYTRIVFTDQVLKFLSQDELVYTFGETVALGASGIVIWGSWENTRTKESCQAIKEYMDTTLNPYIINVTLAAKMCSQVLCQEQGVCIRKNWNSSDYLHLNPDNFAIQLEKGGKFTVRGKPTLEDLEQFSEKFYCSCYSTLSCKEKADVKDTDAVDVCIADGVCIDAF

SEQ ID NO: 251 - protein, 431 aa, Artificial Sequence
  Synthetic Construct
FRAPPVIPNVPFLWAWNAPSEFCLGKFDEPLDMSLFSFIGSPRINATGQGVTIFYVDRLGYYPYADSITGVTVNGGIPQKISLQDHLDKAKKDITFYMPVDNLGMAVIDWEEWRPTWARNWKPKDVYKNRSIELVQQQNVQLSLTEATEKAKQEFEKAGKDFLVETIKLGKLLRPNHLWGYYLFPDCYNHHYKKPGYNGSCFNVEIKRNDDLSWLWNESTALYPSIYLNTQQSPVAATLYVRNRVREAIRVSKIPDAKSPLPVFAYTRIVFTDQVLKFLSQDELVYTFGETVALGASGIVIWGSWENTRTKESCQAIKEYMDTTLNPYIINVTLAAKMCSQVLCQEQGVCIRKNWNSSDYLHLNPDNFAIQLEKGGKFTVRGKPTLEDLEQFSEKFYCSCYSTLSCKEKADVKDTDAVDVCIADGVCIDAF

SEQ ID NO: 252 - protein, 431 aa, Artificial Sequence
  Synthetic Construct
FRAPPVIPNVPFLWAWNAPSEFCLGKFDEPLDMSLFSFIGSPRINATGQGVTIFYVDRLGYYPYIASITGVTVNGGIPQKISLQDHLDKAKKDITFYMPVDNLGMAVIDWEEWRPTWARNWKPKDVYKNRSIELVQQQNVQLSLTEATEKAKQEFEKAGKDFLVETIKLGKLLRPNHLWGYYLFPDCYNHHYKKPGYNGSCFNVEIKRNDDLSWLWNESTALYPSIYLNTQQSPVAATLYVRNRVREAIRVSKIPDAKSPLPVFAYTRIVFTDQVLKFLSQDELVYTFGETVALGASGIVIWGSWENTRTKESCQAIKEYMDTTLNPYIINVTLAAKMCSQVLCQEQGVCIRKNWNSSDYLHLNPDNFAIQLEKGGKFTVRGKPTLEDLEQFSEKFYCSCYSTLSCKEKADVKDTDAVDVCIADGVCIDAF

SEQ ID NO: 253 - protein, 431 aa, Artificial Sequence
  Synthetic Construct
FRAPPVIPNVPFLWAWNAPSEFCLGKFDEPLDMSLFSFIGSPRINATGQGVTIFYVDRLGYYPYIDAITGVTVNGGIPQKISLQDHLDKAKKDITFYMPVDNLGMAVIDWEEWRPTWARNWKPKDVYKNRSIELVQQQNVQLSLTEATEKAKQEFEKAGKDFLVETIKLGKLLRPNHLWGYYLFPDCYNHHYKKPGYNGSCFNVEIKRNDDLSWLWNESTALYPSIYLNTQQSPVAATLYVRNRVREAIRVSKIPDAKSPLPVFAYTRIVFTDQVLKFLSQDELVYTFGETVALGASGIVIWGSWENTRTKESCQAIKEYMDTTLNPYIINVTLAAKMCSQVLCQEQGVCIRKNWNSSDYLHLNPDNFAIQLEKGGKFTVRGKPTLEDLEQFSEKFYCSCYSTLSCKEKADVKDTDAVDVCIADGVCIDAF

SEQ ID NO: 254 - protein, 431 aa, Artificial Sequence
  Synthetic Construct
FRAPPVIPNVPFLWAWNAPSEFCLGKFDEPLDMSLFSFIGSPRINATGQGVTIFYVDRLGYYPYIDSATGVTVNGGIPQKISLQDHLDKAKKDITFYMPVDNLGMAVIDWEEWRPTWARNWKPKDVYKNRSIELVQQQNVQLSLTEATEKAKQEFEKAGKDFLVETIKLGKLLRPNHLWGYYLFPDCYNHHYKKPGYNGSCFNVEIKRNDDLSWLWNESTALYPSIYLNTQQSPVAATLYVRNRVREAIRVSKIPDAKSPLPVFAYTRIVFTDQVLKFLSQDELVYTFGETVALGASGIVIWGSWENTRTKESCQAIKEYMDTTLNPYIINVTLAAKMCSQVLCQEQGVCIRKNWNSSDYLHLNPDNFAIQLEKGGKFTVRGKPTLEDLEQFSEKFYCSCYSTLSCKEKADVKDTDAVDVCIADGVCIDAF

SEQ ID NO: 255 - protein, 431 aa, Artificial Sequence
  Synthetic Construct
FRAPPVIPNVPFLWAWNAPSEFCLGKFDEPLDMSLFSFIGSPRINATGQGVTIFYVDRLGYYPYIDSITGVTVNGGIPQKISLQDHLDKAKKDIAFYMPVDNLGMAVIDWEEWRPTWARNWKPKDVYKNRSIELVQQQNVQLSLTEATEKAKQEFEKAGKDFLVETIKLGKLLRPNHLWGYYLFPDCYNHHYKKPGYNGSCFNVEIKRNDDLSWLWNESTALYPSIYLNTQQSPVAATLYVRNRVREAIRVSKIPDAKSPLPVFAYTRIVFTDQVLKFLSQDELVYTFGETVALGASGIVIWGSWENTRTKESCQAIKEYMDTTLNPYIINVTLAAKMCSQVLCQEQGVCIRKNWNSSDYLHLNPDNFAIQLEKGGKFTVRGKPTLEDLEQFSEKFYCSCYSTLSCKEKADVKDTDAVDVCIADGVCIDAF

SEQ ID NO: 256 - protein, 431 aa, Artificial Sequence
  Synthetic Construct
FRAPPVIPNVPFLWAWNAPSEFCLGKFDEPLDMSLFSFIGSPRINATGQGVTIFYVDRLGYYPYIDSITGVTVNGGIPQKISLQDHLDKAKKDITAYMPVDNLGMAVIDWEEWRPTWARNWKPKDVYKNRSIELVQQQNVQLSLTEATEKAKQEFEKAGKDFLVETIKLGKLLRPNHLWGYYLFPDCYNHHYKKPGYNGSCFNVEIKRNDDLSWLWNESTALYPSIYLNTQQSPVAATLYVRNRVREAIRVSKIPDAKSPLPVFAYTRIVFTDQVLKFLSQDELVYTFGETVALGASGIVIWGSWENTRTKESCQAIKEYMDTTLNPYIINVTLAAKMCSQVLCQEQGVCIRKNWNSSDYLHLNPDNFAIQLEKGGKFTVRGKPTLEDLEQFSEKFYCSCYSTLSCKEKADVKDTDAVDVCIADGVCIDAF

SEQ ID NO: 257 - protein, 431 aa, Artificial Sequence
  Synthetic Construct
FRAPPVIPNVPFLWAWNAPSEFCLGKFDEPLDMSLFSFIGSPRINATGQGVTIFYVDRLGYYPYIDSITGVTVNGGIPQKISLQDHLDKAKKDITFAMPVDNLGMAVIDWEEWRPTWARNWKPKDVYKNRSIELVQQQNVQLSLTEATEKAKQEFEKAGKDFLVETIKLGKLLRPNHLWGYYLFPDCYNHHYKKPGYNGSCFNVEIKRNDDLSWLWNESTALYPSIYLNTQQSPVAATLYVRNRVREAIRVSKIPDAKSPLPVFAYTRIVFTDQVLKFLSQDELVYTFGETVALGASGIVIWGSWENTRTKESCQAIKEYMDTTLNPYIINVTLAAKMCSQVLCQEQGVCIRKNWNSSDYLHLNPDNFAIQLEKGGKFTVRGKPTLEDLEQFSEKFYCSCYSTLSCKEKADVKDTDAVDVCIADGVCIDAF

SEQ ID NO: 258 - protein, 431 aa, Artificial Sequence
  Synthetic Construct
FRAPPVIPNVPFLWAWNAPSEFCLGKFDEPLDMSLFSFIGSPRINATGQGVTIFYVDRLGYYPYIDSITGVTVNGGIPQKISLQDHLDKAKKDITFYMPVDNLGMAVIDWEEWRPTWARNWKPKDVYKNRSIELVQQQNVQLSLTEATEKAKQEFEKAGKDFLVETIKLGKLLRPNHLWGYYLFPDCYNHHYKKPGYNGSCFNAEIKRNDDLSWLWNESTALYPSIYLNTQQSPVAATLYVRNRVREAIRVSKIPDAKSPLPVFAYTRIVFTDQVLKFLSQDELVYTFGETVALGASGIVIWGSWENTRTKESCQAIKEYMDTTLNPYIINVTLAAKMCSQVLCQEQGVCIRKNWNSSDYLHLNPDNFAIQLEKGGKFTVRGKPTLEDLEQFSEKFYCSCYSTLSCKEKADVKDTDAVDVCIADGVCIDAF

SEQ ID NO: 259 - protein, 431 aa, Artificial Sequence
  Synthetic Construct
FRAPPVIPNVPFLWAWNAPSEFCLGKFDEPLDMSLFSFIGSPRINATGQGVTIFYVDRLGYYPYIDSITGVTVNGGIPQKISLQDHLDKAKKDITFYMPVDNLGMAVIDWEEWRPTWARNWKPKDVYKNRSIELVQQQNVQLSLTEATEKAKQEFEKAGKDFLVETIKLGKLLRPNHLWGYYLFPDCYNHHYKKPGYNGSCFNVAIKRNDDLSWLWNESTALYPSIYLNTQQSPVAATLYVRNRVREAIRVSKIPDAKSPLPVFAYTRIVFTDQVLKFLSQDELVYTFGETVALGASGIVIWGSWENTRTKESCQAIKEYMDTTLNPYIINVTLAAKMCSQVLCQEQGVCIRKNWNSSDYLHLNPDNFAIQLEKGGKFTVRGKPTLEDLEQFSEKFYCSCYSTLSCKEKADVKDTDAVDVCIADGVCIDAF

SEQ ID NO: 260 - protein, 431 aa, Artificial Sequence
  Synthetic Construct
FRAPPVIPNVPFLWAWNAPSEFCLGKFDEPLDMSLFSFIGSPRINATGQGVTIFYVDRLGYYPYIDSITGVTVNGGIPQKISLQDHLDKAKKDITFYMPVDNLGMAVIDWEEWRPTWARNWKPKDVYKNRSIELVQQQNVQLSLTEATEKAKQEFEKAGKDFLVETIKLGKLLRPNHLWGYYLFPDCYNHHYKKPGYNGSCFNVEAKRNDDLSWLWNESTALYPSIYLNTQQSPVAATLYVRNRVREAIRVSKIPDAKSPLPVFAYTRIVFTDQVLKFLSQDELVYTFGETVALGASGIVIWGSWENTRTKESCQAIKEYMDTTLNPYIINVTLAAKMCSQVLCQEQGVCIRKNWNSSDYLHLNPDNFAIQLEKGGKFTVRGKPTLEDLEQFSEKFYCSCYSTLSCKEKADVKDTDAVDVCIADGVCIDAF

SEQ ID NO: 261 - protein, 431 aa, Artificial Sequence
  Synthetic Construct
FRAPPVIPNVPFLWAWNAPSEFCLGKFDEPLDMSLFSFIGSPRINATGQGVTIFYVDRLGYYPYIDSITGVTVNGGIPQKISLQDHLDKAKKDITFYMPVDNLGMAVIDWEEWRPTWARNWKPKDVYKNRSIELVQQQNVQLSLTEATEKAKQEFEKAGKDFLVETIKLGKLLRPNHLWGYYLFPDCYNHHYKKPGYNGSCFNVEIARNDDLSWLWNESTALYPSIYLNTQQSPVAATLYVRNRVREAIRVSKIPDAKSPLPVFAYTRIVFTDQVLKFLSQDELVYTFGETVALGASGIVIWGSWENTRTKESCQAIKEYMDTTLNPYIINVTLAAKMCSQVLCQEQGVCIRKNWNSSDYLHLNPDNFAIQLEKGGKFTVRGKPTLEDLEQFSEKFYCSCYSTLSCKEKADVKDTDAVDVCIADGVCIDAF

SEQ ID NO: 262 - protein, 431 aa, Artificial Sequence
  Synthetic Construct
FRAPPVIPNVPFLWAWNAPSEFCLGKFDEPLDMSLFSFIGSPRINATGQGVTIFYVDRLGYYPYIDSITGVTVNGGIPQKISLQDHLDKAKKDITFYMPVDNLGMAVIDWEEWRPTWARNWKPKDVYKNRSIELVQQQNVQASLTEATEKAKQEFEKAGKDFLVETIKLGKLLRPNHLWGYYLFPDCYNHHYKKPGYNGSCFNVEIKRNDDLSWLWNESTALYPSIYLNTQQSPVAATLYVRNRVREAIRVSKIPDAKSPLPVFAYTRIVFTDQVLKFLSQDELVYTFGETVALGASGIVIWGSWENTRTKESCQAIKEYMDTTLNPYIINVTLAAKMCSQVLCQEQGVCIRKNWNSSDYLHLNPDNFAIQLEKGGKFTVRGKPTLEDLEQFSEKFYCSCYSTLSCKEKADVKDTDAVDVCIADGVCIDAF

SEQ ID NO: 263 - protein, 431 aa, Artificial Sequence
  Synthetic Construct
FRAPPVIPNVPFLWAWNAPSEFCLGKFDEPLDMSLFSFIGSPRINATGQGVTIFYVDRLGYYPYIDSITGVTVNGGIPQKISLQDHLDKAKKDITFYMPVDNLGMAVIDWEEWRPTWARNWKPKDVYKNRSIELVQQQNVQLALTEATEKAKQEFEKAGKDFLVETIKLGKLLRPNHLWGYYLFPDCYNHHYKKPGYNGSCFNVEIKRNDDLSWLWNESTALYPSIYLNTQQSPVAATLYVRNRVREAIRVSKIPDAKSPLPVFAYTRIVFTDQVLKFLSQDELVYTFGETVALGASGIVIWGSWENTRTKESCQAIKEYMDTTLNPYIINVTLAAKMCSQVLCQEQGVCIRKNWNSSDYLHLNPDNFAIQLEKGGKFTVRGKPTLEDLEQFSEKFYCSCYSTLSCKEKADVKDTDAVDVCIADGVCIDAF

SEQ ID NO: 264 - protein, 431 aa, Artificial Sequence
  Synthetic Construct
FRAPPVIPNVPFLWAWNAPSEFCLGKFDEPLDMSLFSFIGSPRINATGQGVTIFYVDRLGYYPYIDSITGVTVNGGIPQKISLQDHLDKAKKDITFYMPVDNLGMAVIDWEEWRPTWARNWKPKDVYKNRSIELVQQQNVQLSATEATEKAKQEFEKAGKDFLVETIKLGKLLRPNHLWGYYLFPDCYNHHYKKPGYNGSCFNVEIKRNDDLSWLWNESTALYPSIYLNTQQSPVAATLYVRNRVREAIRVSKIPDAKSPLPVFAYTRIVFTDQVLKFLSQDELVYTFGETVALGASGIVIWGSWENTRTKESCQAIKEYMDTTLNPYIINVTLAAKMCSQVLCQEQGVCIRKNWNSSDYLHLNPDNFAIQLEKGGKFTVRGKPTLEDLEQFSEKFYCSCYSTLSCKEKADVKDTDAVDVCIADGVCIDAF

SEQ ID NO: 265 - protein, 431 aa, Artificial Sequence
  Synthetic Construct
FRAPPVIPNVPFLWAWNAPSEFCLGKFDEPLDMSLFSFIGSPRINATGQGVTIFYVDRLGYYPYIDSITGVTVNGGIPQKISLQDHLDKAKKDITFYMPVDNLGMAVIDWEEWRPTWARNWKPKDVYKNRSIELVQQQNVQLSLAEATEKAKQEFEKAGKDFLVETIKLGKLLRPNHLWGYYLFPDCYNHHYKKPGYNGSCFNVEIKRNDDLSWLWNESTALYPSIYLNTQQSPVAATLYVRNRVREAIRVSKIPDAKSPLPVFAYTRIVFTDQVLKFLSQDELVYTFGETVALGASGIVIWGSWENTRTKESCQAIKEYMDTTLNPYIINVTLAAKMCSQVLCQEQGVCIRKNWNSSDYLHLNPDNFAIQLEKGGKFTVRGKPTLEDLEQFSEKFYCSCYSTLSCKEKADVKDTDAVDVCIADGVCIDAF

SEQ ID NO: 266 - protein, 431 aa, Artificial Sequence
  Synthetic Construct
FRAPPVIPNVPFLWAWNAPSEFCLGKFDEPLDMSLFSFIGSPRINATGQGVTIFYVDRLGYYPYIDSITGVTVNGGIPQKISLQDHLDKAKKDITFYMPVDNLGMAVIDWEEWRPTWARNWKPKDVYKNRSIELVQQQNVQLSLTEAAEKAKQEFEKAGKDFLVETIKLGKLLRPNHLWGYYLFPDCYNHHYKKPGYNGSCFNVEIKRNDDLSWLWNESTALYPSIYLNTQQSPVAATLYVRNRVREAIRVSKIPDAKSPLPVFAYTRIVFTDQVLKFLSQDELVYTFGETVALGASGIVIWGSWENTRTKESCQAIKEYMDTTLNPYIINVTLAAKMCSQVLCQEQGVCIRKNWNSSDYLHLNPDNFAIQLEKGGKFTVRGKPTLEDLEQFSEKFYCSCYSTLSCKEKADVKDTDAVDVCIADGVCIDAF

SEQ ID NO: 267 - protein, 431 aa, Artificial Sequence
  Synthetic Construct
FRAPPVIPNVPFLWAWNAPSEFCLGKFDEPLDMSLFSFIGSPRINATGQGVTIFYVDRLGYYPYIDSITGVTVNGGIPQKISLQDHLDKAKKDITFYMPVDNLGMAVIDWEEWRPTWARNWKPKDVYKNRSIELVQQQNVQLSLTEATAKAKQEFEKAGKDFLVETIKLGKLLRPNHLWGYYLFPDCYNHHYKKPGYNGSCFNVEIKRNDDLSWLWNESTALYPSIYLNTQQSPVAATLYVRNRVREAIRVSKIPDAKSPLPVFAYTRIVFTDQVLKFLSQDELVYTFGETVALGASGIVIWGSWENTRTKESCQAIKEYMDTTLNPYIINVTLAAKMCSQVLCQEQGVCIRKNWNSSDYLHLNPDNFAIQLEKGGKFTVRGKPTLEDLEQFSEKFYCSCYSTLSCKEKADVKDTDAVDVCIADGVCIDAF

SEQ ID NO: 268 - protein, 431 aa, Artificial Sequence
  Synthetic Construct
FRAPPVIPNVPFLWAWNAPSEFCLGKFDEPLDMSLFSFIGSPRINATGQGVTIFYVDRLGYYPYIDSITGVTVNGGIPQKISLQDHLDKAKKDITFYMPVDNLGMAVIDWEEWRPTWARNWKPKDVYKNRSIELVQQQNVQLSLTEATEAAKQEFEKAGKDFLVETIKLGKLLRPNHLWGYYLFPDCYNHHYKKPGYNGSCFNVEIKRNDDLSWLWNESTALYPSIYLNTQQSPVAATLYVRNRVREAIRVSKIPDAKSPLPVFAYTRIVFTDQVLKFLSQDELVYTFGETVALGASGIVIWGSWENTRTKESCQAIKEYMDTTLNPYIINVTLAAKMCSQVLCQEQGVCIRKNWNSSDYLHLNPDNFAIQLEKGGKFTVRGKPTLEDLEQFSEKFYCSCYSTLSCKEKADVKDTDAVDVCIADGVCIDAF

SEQ ID NO: 269 - protein, 431 aa, Artificial Sequence
  Synthetic Construct
FRAPPVIPNVPFLWAWNAPSEFCLGKFDEPLDMSLFSFIGSPRINATGQGVTIFYVDRLGYYPYIDSITGVTVNGGIPQKISLQDHLDKAKKDITFYMPVDNLGMAVIDWEEWRPTWARNWKPKDVYKNRSIELVQQQNVQLSLTEATEKAKQEFEKAGKDFLVETIKLGKLLRPNHLWGYYLFPDCYNHHYKKPGYNGSCFNVEIKRNDDLSWLWNESTALYPSIYLNTQQSPVAATLYVRNRVREAIRVSAIPDAKSPLPVFAYTRIVFTDQVLKFLSQDELVYTFGETVALGASGIVIWGSWENTRTKESCQAIKEYMDTTLNPYIINVTLAAKMCSQVLCQEQGVCIRKNWNSSDYLHLNPDNFAIQLEKGGKFTVRGKPTLEDLEQFSEKFYCSCYSTLSCKEKADVKDTDAVDVCIADGVCIDAF

SEQ ID NO: 270 - protein, 431 aa, Artificial Sequence
  Synthetic Construct
FRAPPVIPNVPFLWAWNAPSEFCLGKFDEPLDMSLFSFIGSPRINATGQGVTIFYVDRLGYYPYIDSITGVTVNGGIPQKISLQDHLDKAKKDITFYMPVDNLGMAVIDWEEWRPTWARNWKPKDVYKNRSIELVQQQNVQLSLTEATEKAKQEFEKAGKDFLVETIKLGKLLRPNHLWGYYLFPDCYNHHYKKPGYNGSCFNVEIKRNDDLSWLWNESTALYPSIYLNTQQSPVAATLYVRNRVREAIRVSKAPDAKSPLPVFAYTRIVFTDQVLKFLSQDELVYTFGETVALGASGIVIWGSWENTRTKESCQAIKEYMDTTLNPYIINVTLAAKMCSQVLCQEQGVCIRKNWNSSDYLHLNPDNFAIQLEKGGKFTVRGKPTLEDLEQFSEKFYCSCYSTLSCKEKADVKDTDAVDVCIADGVCIDAF

SEQ ID NO: 271 - protein, 431 aa, Artificial Sequence
  Synthetic Construct
FRAPPVIPNVPFLWAWNAPSEFCLGKFDEPLDMSLFSFIGSPRINATGQGVTIFYVDRLGYYPYIDSITGVTVNGGIPQKISLQDHLDKAKKDITFYMPVDNLGMAVIDWEEWRPTWARNWKPKDVYKNRSIELVQQQNVQLSLTEATEKAKQEFEKAGKDFLVETIKLGKLLRPNHLWGYYLFPDCYNHHYKKPGYNGSCFNVEIKRNDDLSWLWNESTALYPSIYLNTQQSPVAATLYVRNRVREAIRVSKIADAKSPLPVFAYTRIVFTDQVLKFLSQDELVYTFGETVALGASGIVIWGSWENTRTKESCQAIKEYMDTTLNPYIINVTLAAKMCSQVLCQEQGVCIRKNWNSSDYLHLNPDNFAIQLEKGGKFTVRGKPTLEDLEQFSEKFYCSCYSTLSCKEKADVKDTDAVDVCIADGVCIDAF

SEQ ID NO: 272 - protein, 431 aa, Artificial Sequence
  Synthetic Construct
FRAPPVIPNVPFLWAWNAPSEFCLGKFDEPLDMSLFSFIGSPRINATGQGVTIFYVDRLGYYPYIDSITGVTVNGGIPQKISLQDHLDKAKKDITFYMPVDNLGMAVIDWEEWRPTWARNWKPKDVYKNRSIELVQQQNVQLSLTEATEKAKQEFEKAGKDFLVETIKLGKLLRPNHLWGYYLFPDCYNHHYKKPGYNGSCFNVEIKRNDDLSWLWNESTALYPSIYLNTQQSPVAATLYVRNRVREAIRVSKIPDAKSPLPVFAYTRIVFTDQVLKFLSQDELVYTFGETVALGASGIVIWGSWENTRTKESCQAIKEYMDTTLNPYIINVTLAAKMCSQVLCQEQGVCIRKNWNSSDYLHLNPDNFAIQLEKGGKFTVRGKPTLEDLEQFSEKFYCSCYSTASCKEKADVKDTDAVDVCIADGVCIDAF

SEQ ID NO: 273 - protein, 431 aa, Artificial Sequence
  Synthetic Construct
FRAPPVIPNVPFLWAWNAPSEFCLGKFDEPLDMSLFSFIGSPRINATGQGVTIFYVDRLGYYPYIDSITGVTVNGGIPQKISLQDHLDKAKKDITFYMPVDNLGMAVIDWEEWRPTWARNWKPKDVYKNRSIELVQQQNVQLSLTEATEKAKQEFEKAGKDFLVETIKLGKLLRPNHLWGYYLFPDCYNHHYKKPGYNGSCFNVEIKRNDDLSWLWNESTALYPSIYLNTQQSPVAATLYVRNRVREAIRVSKIPDAKSPLPVFAYTRIVFTDQVLKFLSQDELVYTFGETVALGASGIVIWGSWENTRTKESCQAIKEYMDTTLNPYIINVTLAAKMCSQVLCQEQGVCIRKNWNSSDYLHLNPDNFAIQLEKGGKFTVRGKPTLEDLEQFSEKFYCSCYSTLACKEKADVKDTDAVDVCIADGVCIDAF

SEQ ID NO: 274 - protein, 431 aa, Artificial Sequence
  Synthetic Construct
FRAPPVIPNVPFLWAWNAPSEFCLGKFDEPLDMSLFSFIGSPRINATGQGVTIFYVDRLGYYPYIDSITGVTVNGGIPQKISLQDHLDKAKKDITFYMPVDNLGMAVIDWEEWRPTWARNWKPKDVYKNRSIELVQQQNVQLSLTEATEKAKQEFEKAGKDFLVETIKLGKLLRPNHLWGYYLFPDCYNHHYKKPGYNGSCFNVEIKRNDDLSWLWNESTALYPSIYLNTQQSPVAATLYVRNRVREAIRVSKIPDAKSPLPVFAYTRIVFTDQVLKFLSQDELVYTFGETVALGASGIVIWGSWENTRTKESCQAIKEYMDTTLNPYIINVTLAAKMCSQVLCQEQGVCIRKNWNSSDYLHLNPDNFAIQLEKGGKFTVRGKPTLEDLEQFSEKFYCSCYSTLSCKEKADVKATDAVDVCIADGVCIDAF

SEQ ID NO: 275 - protein, 431 aa, Artificial Sequence
  Synthetic Construct
FRAPPVIPNVPFLWAWNAPSEFCLGKFDEPLDMSLFSFIGSPRINATGQGVTIFYVDRLGYYPYIDSITGVTVNGGIPQKISLQDHLDKAKKDITFYMPVDNLGMAVIDWEEWRPTWARNWKPKDVYKNRSIELVQQQNVQLSLTEATEKAKQEFEKAGKDFLVETIKLGKLLRPNHLWGYYLFPDCYNHHYKKPGYNGSCFNVEIKRNDDLSWLWNESTALYPSIYLNTQQSPVAATLYVRNRVREAIRVSKIPDAKSPLPVFAYTRIVFTDQVLKFLSQDELVYTFGETVALGASGIVIWGSWENTRTKESCQAIKEYMDTTLNPYIINVTLAAKMCSQVLCQEQGVCIRKNWNSSDYLHLNPDNFAIQLEKGGKFTVRGKPTLEDLEQFSEKFYCSCYSTLSCKEKADVKDADAVDVCIADGVCIDAF

SEQ ID NO: 276 - protein, 431 aa, Artificial Sequence
  Synthetic Construct
FRAPPVIPNVPFLWAWNAPSEFCLGKFDEPLDMSLFSFIGSPRINATGQGVTIFYVDRLGYYPYIDSITGVTVNGGIPQKISLQDHLDKAKKDITFYMPVDNLGMAVIDWEEWRPTWARNWKPKDVYKNRSIELVQQQNVQLSLTEATEKAKQEFEKAGKDFLVETIKLGKLLRPNHLWGYYLFPDCYNHHYKKPGYNGSCFNVEIKRNDDLSWLWNESTALYPSIYLNTQQSPVAATLYVRNRVREAIRVSKIPDAKSPLPVFAYTRIVFTDQVLKFLSQDELVYTFGETVALGASGIVIWGSWENTRTKESCQAIKEYMDTTLNPYIINVTLAAKMCSQVLCQEQGVCIRKNWNSSDYLHLNPDNFAIQLEKGGKFTVRGKPTLEDLEQFSEKFYCSCYSTLSCKEKADVKDTAAVDVCIADGVCIDAF

SEQ ID NO: 277 - protein, 431 aa, Artificial Sequence
  Synthetic Construct
FRAPPVIPNVPFLWAWNAPSEFCLGKFDEPLDMSLFSFIGSPRINATGQGVTIFYVDRLGYYPYIDSITGVTVNGGIPQKISLQDHLDKAKKDITFYMPVDNLGMAVIDWEEWRPTWARNWKPKDVYKNRSIELVQQQNVQLSLTEATEKAKQEFEKAGKDFLVETIKLGKLLRPNHLWGYYLFPDCYNHHYKKPGYNGSCFNVEIKRNDDLSWLWNESTALYPSIYLNTQQSPVAATLYVRNRVREAIRVSKIPDAKSPLPVFAYTRIVFTDQVLKFLSQDELVYTFGETVALGASGIVIWGSWENTRTKESCQAIKEYMDTTLNPYIINVTLAAKMCSQVLCQEQGVCIRKNWNSSDYLHLNPDNFAIQLEKGGKFTVRGKPTLEDLEQFSEKFYCSCYSTLSCKEKADVKDTDAVDVCIAAGVCIDAF

SEQ ID NO: 278 - protein, 431 aa, Artificial Sequence
  Synthetic Construct
FRAPPVIPNVPFLWAWNAPSEFCLGKFDEPLDMSLFSFIGSPRINATGQGVTIFYVDRLGYYPYIDSITGVTVNGGIPQKISLQDHLDKAKKDITFYMPVDNLGMAVIDWEEWRPTWARNWKPKDVYKNRSIELVQQQNVQLSLTEATEKAKQEFEKAGKDFLVETIKLGKLLRPNHLWGYYLFPDCYNHHYKKPGYNGSCFNVEIKRNDDLSWLWNESTALYPSIYLNTQQSPVAATLYVRNRVREAIRVSKIPDAKSPLPVFAYTRIVFTDQVLKFLSQDELVYTFGETVALGASGIVIWGSWENTRTKESCQAIKEYMDTTLNPYIINVTLAAKMCSQVLCQEQGVCIRKNWNSSDYLHLNPDNFAIQLEKGGKFTVRGKPTLEDLEQFSEKFYCSCYSTLSCKEKADVKDTDAVDVCIADAVCIDAF

SEQ ID NO: 279 - protein, 431 aa, Artificial Sequence
  Synthetic Construct
FRAPPVIPNVPFLWAWNAPSEFCLGKFDEPLDMSLFSFIGSPRINATGQGVTIFYVDRLGYYPYIDSITGVTVNGGIPQKISLQDHLDKAKKDITFYMPVDNLGMAVIDWEEWRPTWARNWKPKDVYKNRSIELVQQQNVQLSLTEATEKAKQEFEKAGKDFLVETIKLGKLLRPNHLWGYYLFPDCYNHHYKKPGYNGSCFNVEIKRNDDLSWLWNESTALYPSIYLNTQQSPVAATLYVRNRVREAIRVSKIPDAKSPLPVFAYTRIVFTDQVLKFLSQDELVYTFGETVALGASGIVIWGSWENTRTKESCQAIKEYMDTTLNPYIINVTLAAKMCSQVLCQEQGVCIRKNWNSSDYLHLNPDNFAIQLEKGGKFTVRGKPTLEDLEQFSEKFYCSCYSTLSCKEKADVKDTDAVDVCIADGACIDAF

SEQ ID NO: 280 - protein, 431 aa, Artificial Sequence
  Synthetic Construct
FRAPPVIPNVPFLWAWNAPSEFCLGKFDEPLDMSLFSFIGSPRIAATGQGVTIFYVDRLGYYPYIDSITGVTVNGGIPQKISLQDHLDKAKKDITFYMPVDNLGMAVIDWEEWRPTWARNWKPKDVYKNRSIELVQQQNVQLSLTEATEKAKQEFEKAGKDFLVETIKLGKLLRPNHLWGYYLFPDCYNHHYKKPGYNGSCFNVEIKRNDDLSWLWNESTALYPSIYLNTQQSPVAATLYVRNRVREAIRVSKIPDAKSPLPVFAYTRIVFTDQVLKFLSQDELVYTFGETVALGASGIVIWGSWENTRTKESCQAIKEYMDTTLNPYIINVTLAAKMCSQVLCQEQGVCIRKNWNSSDYLHLNPDNFAIQLEKGGKFTVRGKPTLEDLEQFSEKFYCSCYSTLSCKEKADVKDTDAVDVCIADGVCIDAF

SEQ ID NO: 281 - protein, 431 aa, Artificial Sequence
  Synthetic Construct
FRAPPVIPNVPFLWAWNAPSEFCLGKFDEPLDMSLFSFIGSPRINATGQGVTIFYVDRLGYYPYIDSITGVTVNGGIPQKISLQDHLDKAKKDITFYMPVDNLGMAVIDWEEWRPTWARNWKPKDVYKARSIELVQQQNVQLSLTEATEKAKQEFEKAGKDFLVETIKLGKLLRPNHLWGYYLFPDCYNHHYKKPGYNGSCFNVEIKRNDDLSWLWNESTALYPSIYLNTQQSPVAATLYVRNRVREAIRVSKIPDAKSPLPVFAYTRIVFTDQVLKFLSQDELVYTFGETVALGASGIVIWGSWENTRTKESCQAIKEYMDTTLNPYIINVTLAAKMCSQVLCQEQGVCIRKNWNSSDYLHLNPDNFAIQLEKGGKFTVRGKPTLEDLEQFSEKFYCSCYSTLSCKEKADVKDTDAVDVCIADGVCIDAF

SEQ ID NO: 282 - protein, 431 aa, Artificial Sequence
  Synthetic Construct
FRAPPVIPNVPFLWAWNAPSEFCLGKFDEPLDMSLFSFIGSPRINATGQGVTIFYVDRLGYYPYIDNITGVTVNGGIPQKISLQDHLDKAKKDITFYMPVDNLGMAVIDWEEWRPTWARNWKPKDVYKNRSIELVQQQNVQLSLTEATEKAKQEFEKAGKDFLVETIKLGKLLRPNHLWGYYLFPDCYNHHYKKPGYNGSCFNVEIKRNDDLSWLWNESTALYPSIYLNTQQSPVAATLYVRNRVREAIRVSKIPDAKSPLPVFAYTRIVFTDQVLKFLSQDELVYTFGETVALGASGIVIWGSWENTRTKESCQAIKEYMDTTLNPYIINVTLAAKMCSQVLCQEQGVCIRKNWNSSDYLHLNPDNFAIQLEKGGKFTVRGKPTLEDLEQFSEKFYCSCYSTLSCKEKADVKDTDAVDVCIADGVCIDAF

SEQ ID NO: 283 - protein, 431 aa, Artificial Sequence
  Synthetic Construct
FRAPPVIPNVPFLWAWNAPSEFCLGKFDEPLDMSLFSFIGSPRINATGQGVTIFYVDRLGYYPYIDSQTGVTVNGGIPQKISLQDHLDKAKKDITFYMPVDNLGMAVIDWEEWRPTWARNWKPKDVYKNRSIELVQQQNVQLSLTEATEKAKQEFEKAGKDFLVETIKLGKLLRPNHLWGYYLFPDCYNHHYKKPGYNGSCFNVEIKRNDDLSWLWNESTALYPSIYLNTQQSPVAATLYVRNRVREAIRVSKIPDAKSPLPVFAYTRIVFTDQVLKFLSQDELVYTFGETVALGASGIVIWGSWENTRTKESCQAIKEYMDTTLNPYIINVTLAAKMCSQVLCQEQGVCIRKNWNSSDYLHLNPDNFAIQLEKGGKFTVRGKPTLEDLEQFSEKFYCSCYSTLSCKEKADVKDTDAVDVCIADGVCIDAF

SEQ ID NO: 284 - protein, 431 aa, Artificial Sequence
  Synthetic Construct
FRAPPVIPNVPFLWAWNAPSEFCLGKFDEPLDMSLFSFIGSPRINATGQGVTIFYVDRLGYYPYIDSITGVTVNGGIPQKISLQDHLDKAKKDITFYMPVDNLGMAVIDWEEWRPTWARNWKPKDVYKNRSIELVQQQNVQLSLTEATEKAKQEFEKAGKDFLVETIKLGKLLRPNHLWGYYLFPDCYNHHYKKPGYNGSCFNVEIKRNDDLSWLWNESTALYPSIYLNTDQSPVAATLYVRNRVREAIRVSKIPDAKSPLPVFAYTRIVFTDQVLKFLSQDELVYTFGETVALGASGIVIWGSWENTRTKESCQAIKEYMDTTLNPYIINVTLAAKMCSQVLCQEQGVCIRKNWNSSDYLHLNPDNFAIQLEKGGKFTVRGKPTLEDLEQFSEKFYCSCYSTLSCKEKADVKDTDAVDVCIADGVCIDAF

SEQ ID NO: 285 - protein, 431 aa, Artificial Sequence
  Synthetic Construct
FRAPPVIPNVPFLWAWNAPSEFCLGKFDEPLDMSLFSFIGSPRINATGQGVTIFYVDRLGYYPYIDSITGVTVNGGIPQKISLQDHLDKAKKDITFYMPVDNLGMAVIDWEEWRPTWARNWKPKDVYKNRSIELVQQQNVQLSLTEATEKAKQEFEKAGKDFLVETIKLGKLLRPNHLWGYYLFPDCYNHHYKKPGYNGSCFNVEIKRNDDLSWLWNESTALYPSIYLNTIQSPVAATLYVRNRVREAIRVSKIPDAKSPLPVFAYTRIVFTDQVLKFLSQDELVYTFGETVALGASGIVIWGSWENTRTKESCQAIKEYMDTTLNPYIINVTLAAKMCSQVLCQEQGVCIRKNWNSSDYLHLNPDNFAIQLEKGGKFTVRGKPTLEDLEQFSEKFYCSCYSTLSCKEKADVKDTDAVDVCIADGVCIDAF

SEQ ID NO: 286 - protein, 431 aa, Artificial Sequence
  Synthetic Construct
FRAPPVIPNVPFLWAWNAPSEFCLGKFDEPLDMSLFSFIGSPRINATGQGVTIFYVDRLGYYPYIDSITGVTVNGGIPQKISLQDHLDKAKKDITFYMPVDNLGMAVIDWEEWRPTWARNWKPKDVYKNRSIELVQQQNVQLSLTEATEKAKQEFEKAGKDFLVETIKLGKLLRPNHLWGYYLFPDCYNHHYKKPGYNGSCFNVEIKRNDDLSWLWNESTALYPSIYLNTQQSPVAATLYVRNRVREAIRVSKGPDAKSPLPVFAYTRIVFTDQVLKFLSQDELVYTFGETVALGASGIVIWGSWENTRTKESCQAIKEYMDTTLNPYIINVTLAAKMCSQVLCQEQGVCIRKNWNSSDYLHLNPDNFAIQLEKGGKFTVRGKPTLEDLEQFSEKFYCSCYSTLSCKEKADVKDTDAVDVCIADGVCIDAF

SEQ ID NO: 287 - protein, 431 aa, Artificial Sequence
  Synthetic Construct
FRAPPVIPNVPFLWAWNAPSEFCLGKFDEPLDMSLFSFIGSPRINATGQGVTIFYVDRLGYYPYIDSITGVTVNGGIPQKISLQDHLDKAKKDITFYMPVDNLGMAVIDWEEWRPTWARNWKPKDVYKNRSIELVQQQNVQLSLTEATEKAKQEFEKAGKDFLVETIKLGKLLRPNHLWGYYLFPDCYNHHYKKPGYNGSCFNVEIKRNDDLSWLWNESTALYPSIYLNTQQSPVAATLYVRNRVREAIRVSKIDDAKSPLPVFAYTRIVFTDQVLKFLSQDELVYTFGETVALGASGIVIWGSWENTRTKESCQAIKEYMDTTLNPYIINVTLAAKMCSQVLCQEQGVCIRKNWNSSDYLHLNPDNFAIQLEKGGKFTVRGKPTLEDLEQFSEKFYCSCYSTLSCKEKADVKDTDAVDVCIADGVCIDAF

SEQ ID NO: 288 - protein, 431 aa, Artificial Sequence
  Synthetic Construct
FRAPPVIPNVPFLWAWNAPSEFCLGKFDEPLDMSLFSFIGSPRINATGQGVTIFYVDRLGYYPYIDSITGVTVNGGIPQKISLQDHLDKAKKDITFYMPVDNLGMAVIDWEEWRPTWARNWKPKDVYKNRSIELVQQQNVQLSLTEATEKAKQEFEKAGKDFLVETIKLGKLLRPNHLWGYYLFPDCYNHHYKKPGYNGSCFNVEIKRNDDLSWLWNESTALYPSIYLNTQQSPVAATLYVRNRVREAIRVSKIPDAKSPLPVFAYTRIVFTDQVLKFLSQDELVYTFGETVALGASGIVIWGSWENTRTKESCQAIKEYMDTTLNPYIINVTLAAKMCSQVLCQEQGVCIRKNWNSSDYLHLNPDNFAIQLEKGGKFTVRGKPTLEDLEQFSEKFYCSCYSTLSCKEKADVKDDDAVDVCIADGVCIDAF

SEQ ID NO: 289 - protein, 431 aa, Artificial Sequence
  Synthetic Construct
FRAPPVIPNVPFLWAWNAPSEFCLGKFDEPLDMSLFSFIGSPRINATGQGVTIFYVDRLGYYPYIDSITGVTVNGGIPQKISLQDHLDKAKKDITFYMPVDNLGMAVIDWEEWRPTWARNWKPKDVYKNRSIELVQQQNVQLSLTEATEKAKQEFEKAGKDFLVETIKLGKLLRPNHLWGYYLFPDCYNHHYKKPGYNGSCFNVEIKRNDDLSWLWNESTALYPSIYLNTQQSPVAATLYVRNRVREAIRVSKIPDAKSPLPVFAYTRIVFTDQVLKFLSQDELVYTFGETVALGASGIVIWGSWENTRTKESCQAIKEYMDTTLNPYIINVTLAAKMCSQVLCQEQGVCIRKNWNSSDYLHLNPDNFAIQLEKGGKFTVRGKPTLEDLEQFSEKFYCSCYSTLSCKEKADVKDHDAVDVCIADGVCIDAF

SEQ ID NO: 290 - protein, 431 aa, Artificial Sequence
  Synthetic Construct
FRAPPVIPNVPFLWAWNAPSEFCLGKFDEPLDMSLFSFIGSPRINATGQGVTIFYVDRLGYYPYIDSITGVTVNGGIPQKISLQDHLDKAKKDITFYMPVDNLGMAVIDWEEWRPTWARNWKPKDVYKNRSIELVQQQNVQLSLTEATEKAKQEFEKAGKDFLVETIKLGKLLRPNHLWGYYLFPDCYNHHYKKPGYNGSCFNVEIKRNDDLSWLWNESTALYPSIYLNTQQSPVAATLYVRNRVREAIRVSKIPDAKSPLPVFAYTRIVFTDQVLKFLSQDELVYTFGETVALGASGIVIWGSWENTRTKESCQAIKEYMDTTLNPYIINVTLAAKMCSQVLCQEQGVCIRKNWNSSDYLHLNPDNFAIQLEKGGKFTVRGKPTLEDLEQFSEKFYCSCYSTLSCKEKADVKDKDAVDVCIADGVCIDAF

SEQ ID NO: 291 - protein, 431 aa, Artificial Sequence
  Synthetic Construct
FRAPPVIPNVPFLWAWNAPSEFCLGKFDEPLDMSLFSFIGSPRINATGQGVTIFYVDRLGYYPYIDSITGVTVNGGIPQKISLQDHLDKAKKDITFYMPVDNLGMAVIDWEEWRPTWARNWKPKDVYKNRSIELVQQQNVQLSLTEATEKAKQEFEKAGKDFLVETIKLGKLLRPNHLWGYYLFPDCYNHHYKKPGYNGSCFNVEIKRNDDLSWLWNESTALYPSIYLNTQQSPVAATLYVRNRVREAIRVSKIPDAKSPLPVFAYTRIVFTDQVLKFLSQDELVYTFGETVALGASGIVIWGSWENTRTKESCQAIKEYMDTTLNPYIINVTLAAKMCSQVLCQEQGVCIRKNWNSSDYLHLNPDNFAIQLEKGGKFTVRGKPTLEDLEQFSEKFYCSCYSTLSCKEKADVKDGDAVDVCIADGVCIDAF

SEQ ID NO: 292 - protein, 431 aa, Artificial Sequence
  Synthetic Construct
FRAPPVIPNVPFLWAWNAPSEFCLGKFDEPLDMSLFSFIGSPRINATGQGVTIFYVDRLGYYPYIDSITGVTVNGGIPQKISLQDHLDKAKKDITFYMPVDNLGMAVIDWEEWRPTWARNWKPKDVYKNRSIELVQQQNVQLSLTEATEKAKQEFEKAGKDFLVETIKLGKLLRPNHLWGYYLFPDCYNHHYKKPGYNGSCFNVEIKRNDDLSWLWNESTALYPSIYLNTQQSPVAATLYVRNRVREAIRVSKIPDAKSPLPVFAYTRIVFTDQVLKFLSQDELVYTFGETVALGASGIVIWGSWENTRTKESCQAIKEYMDTTLNPYIINVTLAAKMCSQVLCQEQGVCIRKNWNSSDYLHLNPDNFAIQLEKGGKFTVRGKPTLEDLEQFSEKFYCSCYSTLSCKEKADVKDPDAVDVCIADGVCIDAF

SEQ ID NO: 293 - protein, 431 aa, Artificial Sequence
  Synthetic Construct
FRAPPVIPNVPFLWAWNAPSEFCLGKFDEPLDMSLFSFIGSPRINATGQGVTIFYVDRLGYYPYIDSITGVTVNGGIPQKISLQDHLDKAKKDITFYMPVDNLGMAVIDWEEWRPTWARNWKPKDVYKNRSIELVQQQNVQLSLTEATEKAKQEFEKAGKDFLVETIKLGKLLRPNHLWGYYLFPDCYNHHYKKPGYNGSCFNVEIKRNDDLSWLWNESTALYPSIYLNTQQSPVAATLYVRNRVREAIRVSKIPDAKSPLPVFAYTRIVFTDQVLKFLSQDELVYTFGETVALGASGIVIWGSWENTRTKESCQAIKEYMDTTLNPYIINVTLAAKMCSQVLCQEQGVCIRKNWNSSDYLHLNPDNFAIQLEKGGKFTVRGKPTLEDLEQFSEKFYCSCYSTLSCKEKADVKDMDAVDVCIADGVCIDAF

SEQ ID NO: 294 - protein, 431 aa, Artificial Sequence
  Synthetic Construct
FRAPPVIPNVPFLWAWNAPSEFCLGKFDEPLDMSLFSFIGSPRINATGQGVTIFYVDRLGYYPYIDSITGVTVNGGIPQKISLQDHLDKAKKDITFYMPVDNLGMAVIDWEEWRPTWARNWKPKDVYKNRSIELVQQQNVQLSLTEATEKAKQEFEKAGKDFLVETIKLGKLLRPNHLWGYYLFPDCYNHHYKKPGYNGSCFNVEIKRNDDLSWLWNESTALYPSIYLNTQQSPVAATLYVRNRVREAIRVSKIPDAKSPLPVFAYTRIVFTDQVLKFLSQDELVYTFGETVALGASGIVIWGSWENTRTKESCQAIKEYMDTTLNPYIINVTLAAKMCSQVLCQEQGVCIRKNWNSSDYLHLNPDNFAIQLEKGGKFTVRGKPTLEDLEQFSEKFYCSCYSTLSCKEKADVKDFDAVDVCIADGVCIDAF

SEQ ID NO: 295 - protein, 431 aa, Artificial Sequence
  Synthetic Construct
FRAPPVIPNVPFLWAWNAPSEFCLGKFDEPLDMSLFSFIGSPRINATGQGVTIFYVDRLGYYPYIDSITGVTVNGGIPQKISLQDHLDKAKKDITFYMPVDNLGMAVIDWEEWRPTWARNWKPKDVYKNRSIELVQQQNVQLSLTEATEKAKQEFEKAGKDFLVETIKLGKLLRPNHLWGYYLFPDCYNHHYKKPGYNGSCFNVEIKRNDDLSWLWNESTALYPSIYLNTQQSPVAATLYVRNRVREAIRVSKIPDAKSPLPVFAYTRIVFTDQVLKFLSQDELVYTFGETVALGASGIVIWGSWENTRTKESCQAIKEYMDTTLNPYIINVTLAAKMCSQVLCQEQGVCIRKNWNSSDYLHLNPDNFAIQLEKGGKFTVRGKPTLEDLEQFSEKFYCSCYSTLSCKEKADVKDTDAVDVCIARGVCIDAF

SEQ ID NO: 296 - protein, 431 aa, Artificial Sequence
  Synthetic Construct
FRAPPVIPNVPFLWAWNAPSEFCLGKFDEPLDMSLFSFIGSPRINATGQGVTIFYVDRLGYYPYIDSITGVTVNGGIPQKISLQDHLDKAKKDITFYMPVDNLGMAVIDWEEWRPTWARNWKPKDVYKNRSIELVQQQNVQLSLTEATEKAKQEFEKAGKDFLVETIKLGKLLRPNHLWGYYLFPDCYNHHYKKPGYNGSCFNVEIKRNDDLSWLWNESTALYPSIYLNTQQSPVAATLYVRNRVREAIRVSKIPDAKSPLPVFAYTRIVFTDQVLKFLSQDELVYTFGETVALGASGIVIWGSWENTRTKESCQAIKEYMDTTLNPYIINVTLAAKMCSQVLCQEQGVCIRKNWNSSDYLHLNPDNFAIQLEKGGKFTVRGKPTLEDLEQFSEKFYCSCYSTLSCKEKADVKDTDAVDVCIADGYCIDAF

SEQ ID NO: 297 - protein, 431 aa, Artificial Sequence
  Synthetic Construct
FRAPPVIPNVPFLWAWNAPSEFCLGKFDEPLDMSLFSFIGSPRINATGQGVTIFYVDRLGYYPYIDSITGVTVNGGIPQKISLQDHLDKAKKDITFYMPVDNLGMAVIDWEEWRPTWARNWKPKDVYKNRSIELVQQQNVQLTLTEATEKAKQEFEKAGKDFLVETIKLGKLLRPNHLWGYYLFPDCYNHHYKKPGYNGSCFNVEIKRNDDLSWLWNESTALYPSIYLNTQQSPVAATLYVRNRVREAIRVSKIPDAKSPLPVFAYTRIVFTDQVLKFLSQDELVYTFGETVALGASGIVIWGSWENTRTKESCQAIKEYMDTTLNPYIINVTLAAKMCSQVLCQEQGVCIRKNWNSSDYLHLNPDNFAIQLEKGGKFTVRGKPTLEDLEQFSEKFYCSCYSTLSCKEKADVKDTDAVDVCIADGVCIDAF

SEQ ID NO: 298 - protein, 431 aa, Artificial Sequence
  Synthetic Construct
FRAPPVIPNVPFLWAWNAPSEFCLGKFDEPLDMSLFSFIGSPRINATGQGVTIFYVDRLGYYPYIDSITGVTVNGGIPQKISLQDHLDKAKKDITFYMPVDNLGMAVIDWEEWRPTWARNWKPKDVYKNRSIELVQQQNVQLSLTEATEKAKQEFEKAGKDFLVETIKLGKLLRPNHLWGYYLFPDCYNHHYKKPGYNGSCFNVEIKRNDDLSWLWNESTALYPSIYLNTQQSPVAATLYVRNRVREAIRVSKIPDAKSPLPVFAYTRIVFTDQVLKFLSQDELVYTFGETVALGASGIVIWGSWENTRTKESCQAIKEYMDTTLNPYIINVTLAAKMCSQVLCQEQGVCIRKNWNSSDYLHLNPDNFAIQLEKGGKFTVRGKPTLEDLEQFSEKFYCSCYSTLSCKEKADVKSTDAVDVCIADGVCIDAF

SEQ ID NO: 299 - protein, 431 aa, Artificial Sequence
  Synthetic Construct
FRAPPVIPNVPFLWAWNAPSEFCLGKFDEPLDMSLFSFIGSPRINATGQGVTIFYVDRLGYYPYIDSITGVTVNGGIPQKISLQDHLDKAKKDITFYMPVDNLGMAVIDWEEWRPTWARNWKPKDVYKNRSIELVQQQNVQLSLTEATEKAKQEFEKAGKDFLVETIKLGKLLRPNHLWGYYLFPDCYNHHYKKPGYNGSCFNVEIKRNDDLSWLWNESTALYPSIYLNTQQSPVAATLYVRNRVREAIRVSKIPDAKSPLPVFAYTRIVFTDQVPKFLSQDELVYTFGETVALGASGIVIWGSWENTRTKESCQAIKEYMDTTLNPYIINVTLAAKMCSQVLCQEQGVCIRKNWNSSDYLHLNPDNFAIQLEKGGKFTVRGKPTLEDLEQFSEKFYCSCYSTLSCKEKADVKDTDAVDVCIADGVCIDAF

SEQ ID NO: 300 - protein, 431 aa, Artificial Sequence
  Synthetic Construct
FRAPPVIPNVPFLWAWNAPSEFCLGKFDEPLDMSLFSFIGSPRINATGQGVTIFYVDRLGYYPYIDSITGVTVNGGIPQKISLQDHLDKAKKDITFYMPVDNLGMAVIDWEEWRPTWARNWKPKDVYKNRSIELVQQQNVQLSLTEATEKAKQEFEKAGKDFLVETIKLGKLLRPNHLWGYYLFPDCYNHHYKKPGYNGSCFNVEIKRNDDLSWLWNESTALYPSIYLNTQQSPVAATLYVRNRVREAIRVSKIPDAKSPLPVFAYTRIVFTDQVMKFLSQDELVYTFGETVALGASGIVIWGSWENTRTKESCQAIKEYMDTTLNPYIINVTLAAKMCSQVLCQEQGVCIRKNWNSSDYLHLNPDNFAIQLEKGGKFTVRGKPTLEDLEQFSEKFYCSCYSTLSCKEKADVKDTDAVDVCIADGVCIDAF

SEQ ID NO: 301 - protein, 431 aa, Artificial Sequence
  Synthetic Construct
FRAPPVIPNVPFLWAWNAPSEFCLGKFDEPLDMSLFSFIGSPRINATGQGVTIFYVDRLGYYPYIDSITGVTVNGGIPQKISLQDHLDKAKKDITFYMPVDNLGMAVIDWEEWRPTWARNWKPKDVYKNRSIELVQQQNVQSSLTEATEKAKQEFEKAGKDFLVETIKLGKLLRPNHLWGYYLFPDCYNHHYKKPGYNGSCFNVEIKRNDDLSWLWNESTALYPSIYLNTQQSPVAATLYVRNRVREAIRVSKIPDAKSPLPVFAYTRIVFTDQVLKFLSQDELVYTFGETVALGASGIVIWGSWENTRTKESCQAIKEYMDTTLNPYIINVTLAAKMCSQVLCQEQGVCIRKNWNSSDYLHLNPDNFAIQLEKGGKFTVRGKPTLEDLEQFSEKFYCSCYSTLSCKEKADVKDTDAVDVCIADGVCIDAF

SEQ ID NO: 302 - protein, 431 aa, Artificial Sequence
  Synthetic Construct
FRAPPVIPNVPFLWAWNAPSEFCLGKFDEPLDMSLFSFIGSPRINATGQGVTIFYVDRLGYYPYIDSITGVTVNGGIPQKISLQDHLDKAKKDITFYMPVDNLGMAVIDWEEWRPTWARNWKPKDVYKNRSIELVQQQNVQISLTEATEKAKQEFEKAGKDFLVETIKLGKLLRPNHLWGYYLFPDCYNHHYKKPGYNGSCFNVEIKRNDDLSWLWNESTALYPSIYLNTQQSPVAATLYVRNRVREAIRVSKIPDAKSPLPVFAYTRIVFTDQVLKFLSQDELVYTFGETVALGASGIVIWGSWENTRTKESCQAIKEYMDTTLNPYIINVTLAAKMCSQVLCQEQGVCIRKNWNSSDYLHLNPDNFAIQLEKGGKFTVRGKPTLEDLEQFSEKFYCSCYSTLSCKEKADVKDTDAVDVCIADGVCIDAF

SEQ ID NO: 303 - protein, 431 aa, Artificial Sequence
  Synthetic Construct
FRAPPVIPNVPFLWAWNAPSEFCLGKFDEPLDMSLFSFIGSPRINATGQGVTIFYVDRLGYYPYIDSITGVTVNGGIPQKISLQDHLDKAKKDITFYMPVDNLGMAVIDWEEWRPTWARNWKPKDVYKNRSIELVQQQNVQFSLTEATEKAKQEFEKAGKDFLVETIKLGKLLRPNHLWGYYLFPDCYNHHYKKPGYNGSCFNVEIKRNDDLSWLWNESTALYPSIYLNTQQSPVAATLYVRNRVREAIRVSKIPDAKSPLPVFAYTRIVFTDQVLKFLSQDELVYTFGETVALGASGIVIWGSWENTRTKESCQAIKEYMDTTLNPYIINVTLAAKMCSQVLCQEQGVCIRKNWNSSDYLHLNPDNFAIQLEKGGKFTVRGKPTLEDLEQFSEKFYCSCYSTLSCKEKADVKDTDAVDVCIADGVCIDAF

SEQ ID NO: 304 - protein, 431 aa, Artificial Sequence
  Synthetic Construct
FRAPPVIPNVPFLWAWNAPSEFCLGKFDEPLDMSLFSFIGSPRINATGQGVTIFYVDRLGYYPYIDSITGVTVNGGIPQKISLQDHLDKAKKDITFYMPVDNLGMAVIDWEEWRPTWARNWKPKDVYKNRSIELVQQQNVQLSLTEATEKAKQEFEKAGKDFLVETIKLGKLLRPNHLWGYYLFPDCYNHHYKKPGYNGSCFNVEIKRNDDLSWLWNESTALYPSIYLNTQQSPVAATLYVRNRVREAIRVSKIPDAKSPLPVFAYTRIVFTDQVLKFLSQDELVYTFGETVALGASGIVIWGSWEFTRTQESCQAIQEYMDTTLNPYIINVTLAAKMCSQVLCQEQGVCIRKNWNSSDYLHLNPDNFAIQLEKGGKFTVRGKPTLEDLEQFSEKFYCSCYSTLSCKEKADVKDTDAVDVCIADGVCIDAF

SEQ ID NO: 305 - protein, 431 aa, Artificial Sequence
  Synthetic Construct
FRAPPVIPNVPFLWAWNAPSEFCLGKFDEPLDMSLFSFIGSPRINATGQGVTIFYVDRLGYYPYIDSITGVTVNGGIPQKISLQDHLDKAKKDISFYMPVDNLGMAVIDWEEWRPTWARNWKPKDVYKNRSIELVQQQNVQLSATEATDKAKQEFEKAGKDFLVETIKLGKLLRPNHLWGYYLFPDCYNHHYKKPGYNGSCFNVEIKRNDDLSWLWNESTALYPSIYLNTNQSPVAATLYVRNRVREAIRVSKLPDAKSPLPVFAYTRIVFTDQALKFLSQDELVYTFGETVALGASGIVIWGSWENTRTKESCQAIKEYMDTTLNPYIINVTLAAKMCSQVLCQEQGVCIRKNWNSSDYLHLNPDNFAIQLEKGGKFTVRGKPTLEDLEQFSEKFYCSCYSTLSCKEKADVKDDDAVDVCIADGVCIDAF

SEQ ID NO: 306 - protein, 432 aa, Artificial Sequence
  Synthetic Construct
NFRAPPVIPNVPFLWAWNAPSEFCLGKFDEPLDMSLFSFIGSPRINATGQGVTIFYVDRLGYYPYIDSITGVTVNGGIPQKISLQDHLDKAKKDITFYMPVDNLGMAVIDWEEWRPTWARNWKPKDVYKNRSIELVQQQNVQLSLTEATEKAKQEFEKAGKDFLVETIKLGKLLRPNHLWGYYLFPDCYNHHYKKPGYNGSCFNVEIKRNDDLSWLWNESTALYPSIYLNTQQSPVAATLYVRNRVREAIRVSKIPDAKSPLPVFAYTRIVFTDQVLKFLSQDELVYTFGETVALGASGIVIWGSWENTRTKESCQAIKEYMDTTLNPYIINVTLAAKMCSQVLCQEQGVCIRKNWNSSDYLHLNPDNFAIQLEKGGKFTVRGKPTLEDLEQFSEKFYCSCYSTLSCKEKADVKDTDAVDVCIADGVCIDAF

SEQ ID NO: 307 - protein, 433 aa, Artificial Sequence
  Synthetic Construct
LNFRAPPVIPNVPFLWAWNAPSEFCLGKFDEPLDMSLFSFIGSPRINATGQGVTIFYVDRLGYYPYIDSITGVTVNGGIPQKISLQDHLDKAKKDITFYMPVDNLGMAVIDWEEWRPTWARNWKPKDVYKNRSIELVQQQNVQLSLTEATEKAKQEFEKAGKDFLVETIKLGKLLRPNHLWGYYLFPDCYNHHYKKPGYNGSCFNVEIKRNDDLSWLWNESTALYPSIYLNTQQSPVAATLYVRNRVREAIRVSKIPDAKSPLPVFAYTRIVFTDQVLKFLSQDELVYTFGETVALGASGIVIWGSWENTRTKESCQAIKEYMDTTLNPYIINVTLAAKMCSQVLCQEQGVCIRKNWNSSDYLHLNPDNFAIQLEKGGKFTVRGKPTLEDLEQFSEKFYCSCYSTLSCKEKADVKDTDAVDVCIADGVCIDAF

SEQ ID NO: 308 - protein, 431 aa, Artificial Sequence
  Synthetic Construct
FKAPPVIPNVPFLWAWNAPSEFCLGKFDEPLDMSLFSFIGSPRINATGQGVTIFYVDRLGYYPYIDSATGVTVNGGIPQKISLQDHLDKAKKDISFYMPVDNLGMAVIDWEEWRPTWARNWKPKDVYKNRSIELVQQQNVQLSMTEATDKAKQEFEKAGKDFLVETIKLGKLLRPNHLWGYYLFPDCYNHHYKKPGYNGSCFNVEIKRNDDLSWLWNESTALYPSIYLNTAQSPVAATLYVRNRVREAIRVSKLPDAKSPLPVFAYTRIVFTDQALKFLSQDELVYTFGETVALGASGIVIWGSWENTRTKESCQAIKEYMDTTLNPYIINVTLAAKMCSQVLCQEQGVCIRKNWNSSDYLHLNPDNFAIQLEKGGKFTVRGKPTLEDLEQFSEKFYCSCYSTLSCKEKADVKDDDAVDVCIADGVCIDAF

SEQ ID NO: 309 - protein, 431 aa, Artificial Sequence
  Synthetic Construct
FRAPPVIPNVPFLWAWNAPSEFCLGKFDEPLDMSLFSFIGSPRINATGQGVTIFYVDRLGYYPYIDSITGVTVNGGIPQKISLQDHLDKAKKDIAFYMPVDNLGMAVIDWEEWRPTWARNWKPKDVYKNRSIELVQQQNVQLSATEATAKAKQEFEKAGKDFLVETIKLGKLLRPNHLWGYYLFPDCYNHHYKKPGYNGSCFNVEIKRNDDLSWLWNESTALYPSIYLNTAQSPVAATLYVRNRVREAIRVSKLPDAKSPLPVFAYTRIVFTDQALKFLSQDELVYTFGETVALGASGIVIWGSWENTRTKESCQAIKEYMDTTLNPYIINVTLAAKMCSQVLCQEQGVCIRKNWNSSDYLHLNPDNFAIQLEKGGKFTVRGKPTLEDLEQFSEKFYCSCYSTLSCKEKADVKDDDAVDVCIADGVCIDAF

SEQ ID NO: 310 - protein, 431 aa, Artificial Sequence
  Synthetic Construct
FRAPPVIPNVPFLWAWNAPSEFCLGKFDEPLDMSLFSFIGSPRINATGQGVTIFYVDRLGYYPYIDSITGVTVNGGIPQKISLQDHLDKAKKDITFYMPVDNLGMAVIDWEEWRPTWARNWKPKDVYKNRSIELVQQQNVQLSLTEATEKAKQEFEKAGKDFLVETIKLGKLLRPNHLWGYYLFPDCYNHHYKKPGYNGSCFNVEIKRNDDLSWLWNESTALYPSIYLNTQQSPVAATLYVRNRVREAIRVSKIPDAKSPLPVFAYTRIVFTDQVLKFLSQDELVYTFGETVALGASGIVIWGSWEITRTMESCQAIKEYMDTTLNPYIINVTLAAKMCSQVLCQEQGVCIRKNWNSSDYLHLNPDNFAIQLEKGGKFTVRGKPTLEDLEQFSEKFYCSCYSTLSCKEKADVKDTDAVDVCIADGVCIDAF

SEQ ID NO: 311 - protein, 431 aa, Artificial Sequence
  Synthetic Construct
FRAPPVIPNVPFLWAWNAPSEFCLGKFDEPLDMSLFSFIGSPRINATGQGVTIFYVDRLGYYPYIDSITGVTVNGGIPQKISLQDHLDKAKKDITFYMPVDNLGMAVIDWEEWRPTWARNWKPKDVYKNRSIELVQQQNVQLSLTEATEKAKQEFEKAGKDFLVETIKLGKLLRPNHLWGYYLFPDCYNHHYKKPGYNGSCFNVEIKRNDDLSWLWNESTALYPSIYLNTQQSPVAATLYVRNRVREAIRVSKIPDAKSPLPVFAYTRIVFTDQVLKFLSQDELVYTFGETVALGASGIVIWGDLSISSTMESCQAIDEYMETILNPYIINVTLAAKMCSQVLCQEQGVCIRKNWNSSDYLHLNPDNFAIQLEKGGKFTVRGKPTLEDLEQFSEKFYCSCYSTLSCKEKADVKDTDAVDVCIADGVCIDAF

SEQ ID NO: 312 - protein, 431 aa, Artificial Sequence
  Synthetic Construct
FRAPPVIPNVPFLWAWNAPSEFCLGKFDEPLDMSLFSFIGSPRINATGQGVTIFYVDRLGYYPYIDSITGVTVNGGIPQKISLQDHLDKAKKDITFYMPVDNLGMAVIDWEEWRPTWARNWKPKDVYKNRSIELVQQQNVQLSLTEATEKAKQEFEKAGKDFLVETIKLGKLLRPNHLWGYYLFPDCYNHHYKKPGYNGSCFNVEIKRNDDLSWLWNESTALYPSIYLNTQQSPVAATLYVRNRVREAIRVSKIPDAKSPLPVFAYTRIVFTDQVLKFLSQDELVYTFGETVALGASGIVIWGDLSISRTMESCQAIDEYMETILNPYIINVTLAAKMCSQVLCQEQGVCIRKNWNSSDYLHLNPDNFAIQLEKGGKFTVRGKPTLEDLEQFSEKFYCSCYSTLSCKEKADVKDTDAVDVCIADGVCIDAF

SEQ ID NO: 313 - protein, 431 aa, Artificial Sequence
  Synthetic Construct
FRAPPVIPNVPFLWAWNAPSEFCLGKFDEPLDMSLFSFIGSPRINATGQGVTIFYVDRLGYYPYIDSITGVTVNGGIPQKISLQDHLDKAKKDISFYMPVDNLGMAVIDWEEWRPTWARNWKPKDVYKNRSIELVQQQNVQLSATEATDKAKQEFEKAGKDFLVETIKLGKLLRPNHLWGYYLFPDCYNHHYKKPGYNGSCFNVEIKRNDDLSWLWNESTALYPSIYLNTNQSPVAATLYVRNRVREAIRVSKLPDAKSPLPVFAYTRIVFTDQALKFLSQDELVYTFGETVALGASGIVIWGSWENTRTMESCQAIKEYMDTTLNPYIINVTLAAKMCSQVLCQEQGVCIRKNWNSSDYLHLNPDNFAIQLEKGGKFTVRGKPTLEDLEQFSEKFYCSCYSTLSCKEKADVKDDDAVDVCIADGVCIDAF

SEQ ID NO: 314 - protein, 431 aa, Artificial Sequence
  Synthetic Construct
FRAPPVIPNVPFLWAWNAPSEFCLGKFDEPLDMSLFSFIGSPRINATGQGVTIFYVDRLGYYPYIDSITGVTVNGGIPQKISLQDHLDKAKKDISFYMPVDNLGMAVIDWEEWRPTWARNWKPKDVYKNRSIELVQQQNVQLSATEATDKAKQEFEKAGKDFLVETIKLGKLLRPNHLWGYYLFPDCYNHHYKKPGYNGSCFNVEIKRNDDLSWLWNESTALYPSIYLNTNQSPVAATLYVRNRVREAIRVSKLPDAKSPLPVFAYTRIVFTDQALKFLSQDELVYTFGETVALGASGIVIWGSWEITRTMESCQAIKEYMDTTLNPYIINVTLAAKMCSQVLCQEQGVCIRKNWNSSDYLHLNPDNFAIQLEKGGKFTVRGKPTLEDLEQFSEKFYCSCYSTLSCKEKADVKDDDAVDVCIADGVCIDAF

SEQ ID NO: 315 - protein, 431 aa, Artificial Sequence
  Synthetic Construct
FRAPPVIPNVPFLWAWNAPSEFCLGKFDEPLDMSLFSFIGSPRINATGQGVTIFYVDRLGYYPYIDSITGVTVNGGIPQKISLQDHLDKAKKDIAFYMPVDNLGMAVIDWEEWRPTWARNWKPKDVYKNRSIELVQQQNVQLSATEATAKAKQEFEKAGKDFLVETIKLGKLLRPNHLWGYYLFPDCYNHHYKKPGYNGSCFNVEIKRNDDLSWLWNESTALYPSIYLNTAQSPVAATLYVRNRVREAIRVSKLPDAKSPLPVFAYTRIVFTDQALKFLSQDELVYTFGETVALGASGIVIWGDLSISSTMESCQAIDEYMETILNPYIINVTLAAKMCSQVLCQEQGVCIRKNWNSSDYLHLNPDNFAIQLEKGGKFTVRGKPTLEDLEQFSEKFYCSCYSTLSCKEKADVKDDDAVDVCIADGVCIDAF

SEQ ID NO: 316 - protein, 431 aa, Artificial Sequence
  Synthetic Construct
FRAPPVIPNVPFLWAWNAPSEFCLGKFDEPLDMSLFSFIGSPRINATGQGVTIFYVDRLGYYPYIDSITGVTVNGGIPQKISLQDHLDKAKKDIAFYMPVDNLGMAVIDWEEWRPTWARNWKPKDVYKNRSIELVQQQNVQLSATEATAKAKQEFEKAGKDFLVETIKLGKLLRPNHLWGYYLFPDCYNHHYKKPGYNGSCFNVEIKRNDDLSWLWNESTALYPSIYLNTAQSPVAATLYVRNRVREAIRVSKLPDAKSPLPVFAYTRIVFTDQALKFLSQDELVYTFGETVALGASGIVIWGDLSISRTMESCQAIDEYMETILNPYIINVTLAAKMCSQVLCQEQGVCIRKNWNSSDYLHLNPDNFAIQLEKGGKFTVRGKPTLEDLEQFSEKFYCSCYSTLSCKEKADVKDDDAVDVCIADGVCIDAF

1. A PH20 variant or fragment thereof comprising amino acid residue substitution, deletion or insertion at least one position in a hyaluronidase variant comprising the amino acid sequence of SEQ ID NO: 3, and having a higher aggregation temperature than an aggregation temperature of wild-type PH20.

2. The PH20 variant or fragment thereof according to claim 1, wherein the PH20 variant or fragment comprises amino acid residue substitution at least one position selected from the group consisting of R39, D65 to L68, N82, T84, I102 to I105, T132 to Y134, N166, L179 to T182, T185 to K187, V241 to K244, N266 to Q269, P271, V272, K290 to P292, Q311 to K314, G340 to N363, L441, S442, D451 to D453, D461, V463 and D461 to V463 in the hyaluronidase variant having the amino acid sequence of SEQ ID NO: 3.

3. The PH20 variant or fragment thereof according to claim 2, wherein the amino acid residue substitution comprises at least one selected from the group consisting of R39K, D65A, E66A, P67A, L68A, N82A, T84N, I102A, D103A, S104A, S104N, I105A, I105Q, T132A, T132S, F133A, Y134A, N166A, N166K, L179A, L179S, L179I, L179F, S180T, S180A, L181A, L181M, T182A, T185A, E186A, E186D, K187A, V241A, E242A, I243A, K244A, N266A, T267A, Q268A, Q268D, Q268I, Q268N, Q269A, P271A, V272A, K290A, I291A, I291G, I291L, P292A, P292D, Q311A, V312A, L313A, L313P, L313M, K314A, G340Q, S341H, S341D, S341T, W342I, W342D, W342H, W342L, E343V, E343S, E343Y, E343Q, N344F, N344I, T345E, T345K, T345S, R346M, R346F, R346L, R346T, R346S, R346A, T347Q, T347E, T347V, T347W, T347H, T347S, K348Q, K348F, K348D, K348T, K348E, K348M, E349L, E349W, E349A, S350Q, S350I, S350D, S350T, S350E, S350N, Q352E, Q352G, Q352Y, Q352W, Q352T, A353E, A353Y, A353H, A353K, I354E, I354Q, I354S, I354V, I354A, I354N, I354T, I354R, I354W, I354L, K355Q, K355H, K355D, E356M, E356F, E356I, E356L, E356Q, E356V, E356D, Y357W, Y357F, M358V, M358R, M358Y, M358L, D359K, D359V, D359Y, D359Q, D359T, D359S, D359E, T360Y, T360R, T360L, T360D, T360S, T361M, T361E, T361H, T361L, T361D, T361I, L362A, N363M, N363E, L441A, S442A, D451A, D451S, T452A, T452D, T452H, T452K, T452G, T452P, T452M, T452F, D453A, D461R, D461A, G462A, V463Y and V463A.

4. The PH20 variant or fragment thereof according to claim 1, further comprising a deletion of at least one amino acid residue at a C-terminus and/or an N-terminus.

5. The PH20 variant or fragment thereof according to claim 4, wherein at least one amino acid residue is deleted by cleavage before an amino acid residue selected from the group consisting of M1 to P42 from the N-terminus.

6. The PH20 variant or fragment thereof according to claim 5, wherein at least one amino acid residue is deleted by cleavage before an amino acid residue L36, N37, F38, R39, A40, P41 or P42 from the N-terminus.

7. The PH20 variant or fragment thereof according to claim 4, wherein at least one amino acid residue is deleted by cleavage after an amino acid residue selected from the group consisting of V455 to L509 from the C-terminus.

8. The PH20 variant or fragment thereof according to claim 7, wherein at least one amino acid residue is deleted by cleavage after an amino acid residue selected from the group consisting of V455 to S490 from the C-terminus.

9. The PH20 variant or fragment thereof according to claim 7, wherein at least one amino acid residue is deleted by cleavage after an amino acid residue V455, D456, C458, D461, C464, I465, D466, A467, F468, K470, P471, P472, M473, E474, T475, E476, P478, I480, Y482, A484, P486, T488 or S490 from the C-terminus.

10. The PH20 variant or fragment thereof according to claim 4, wherein at least one amino acid residue is deleted by cleavage before an amino acid residue F38 from the N-terminus and after an amino acid residue F468 from the C-terminus.

11. The PH20 variant or fragment thereof according to claim 1, wherein the PH20 variant or fragment thereof comprises the amino acid sequence selected from the group consisting of amino acid sequences of SEQ ID NOs: 163 to 316.

12. A composition for treating cancer comprising the PH20 variant or fragment thereof according to claim 1.

13. The composition according to claim 12, wherein the composition is used in a combination therapy with another anticancer drug.

14. The composition according to claim 13, wherein the anticancer drug is an immuno-oncologic agent.

15. The composition according to claim 14, wherein the immuno-oncologic agent comprises an immune checkpoint inhibitor.

16. A nucleic acid encoding the PH20 variant or fragment thereof according to claim 1.

17. A recombinant expression vector comprising the nucleic acid according to claim 16.

18. A host cell transformed with the recombinant expression vector according to claim 17.

19. A method for producing a PH20 variant or fragment thereof, comprising culturing the host cell according to claim 18.
